(19) United States
(12) Patent Application Publication
(10) Pub. No.: US 2006/0286102 A1
(43) Pub. Date: Dec. 21, 2006

(54) Cell surface receptor isoforms and methods of identifying and using the same

(76) Inventors: Pei Jin, Palo Alto, CA (US); H. Michael Shepard, San Francisco, CA (US)

Correspondence Address: FISH & RICHARDSON, PC, P.O. BOX 1022, MINNEAPOLIS, MN, 55440-1022, US

(21) Appl. No.: 11/129,740

(22) Filed: May 13, 2005

Related U.S. Application Data
(60) Provisional application No. 60/666,825, filed on Mar. 30, 2005.
(60) Provisional application No. 60/571,289, filed on May 14, 2004.
(60) Provisional application No. 60/580,990, filed on Jun. 18, 2004.

(51) Int. Cl. A61K 39/395; C07H 21/04; C12P 21/06; C07K 14/705; C07K 16/28

(52) U.S. Cl. 424/143.1; 530/350; 530/388.22; 435/69.1; 435/320.1; 435/325; 536/23.5

(57) ABSTRACT

Isoforms of cell surface receptors, including isoforms of receptor tyrosine kinases, and pharmaceutical compositions containing the isoforms are provided. Chimeras of and conjugates containing the cell surface receptors that contain a portion, such as an extracellular domain, from one cell surface receptor, and a second portion, particularly an intron-encoded portion, from a second cell surface protein also are provided. The isoforms modulate the activity of a cell surface receptor. Methods for identifying and preparing isoforms of cell surface receptors including receptor tyrosine kinases are provided. Also provided are methods of treatment with the cell surface receptor isoforms.

### RELATED APPLICATIONS

[0001] Benefit of priority is claimed under 35 U.S.C. §119(e) to U.S. Provisional Application Ser. No. 60/666,825 to Pei Jin and H. Michael Shepard, filed Mar. 30, 2005, entitled “CELL SURFACE RECEPTOR ISOFORMS AND METHODS OF IDENTIFYING AND USING SAME;” to U.S. Provisional Application Ser. No. 60/571,289 to Pei Jin, filed May 14, 2004, entitled “CELL SURFACE RECEPTOR ISOFORMS AND METHODS OF IDENTIFYING AND USING SAME,”; and to U.S. Provisional Application Ser. No. 60/580,990 to Pei Jin, filed Jun. 18, 2004, entitled “CELL SURFACE RECEPTOR ISOFORMS AND METHODS OF IDENTIFYING AND USING SAME.”

[0002] This application also is related to U.S. application Ser. No. 10/846,113, filed May 14, 2004, and to corresponding published International PCT application No. WO 05/016966, published Feb. 24, 2005, entitled “INTRON FUSION PROTEINS, AND METHODS OF IDENTIFYING AND USING SAME.” This application also is related to International PCT application No. PCT US2005/17051 to Pei Jin and H. Michael Shepard, entitled “CELL SURFACE RECEPTOR ISOFORMS AND METHODS OF IDENTIFYING AND USING THE SAME,” filed the same day herewith.

[0003] The subject matter of each of these applications, provisional applications and international applications is incorporated herein by reference thereto.

### INCORPORATION BY REFERENCE OF SEQUENCE LISTING PROVIDED ON COMPACT DISCS

[0004] An electronic version on compact disc (CD-R) of a computer-readable form of the Sequence Listing is filed herewith in duplicate (labeled Copy #1 and Copy #2) along with a third CD-R labeled computer-readable form, the contents of which are incorporated by reference in their entirety. The computer-readable file on each of the aforementioned compact discs originally created on May 13, 2005, and created for resubmission on Aug. 1, 2005, is identical, 1,271 kilobytes in size, and is entitled 2817SEQ.001.txt.

### FIELD OF THE INVENTION

[0005] Isoforms of cell surface receptors, including isoforms of receptor tyrosine kinases and pharmaceutical compositions containing receptor tyrosine kinase isoforms are provided. The cell surface receptor isoforms and compositions containing them can be used in methods of treatment of diseases, such as cancer and inflammatory disease.

### BACKGROUND

[0006] Cell signaling pathways involve a network of molecules including polypeptides and small molecules that interact to relay extracellular, intercellular and intracellular signals. Such pathways interact like a relay, handing off signals from one member of the pathway to the next. Modulation of one member of the pathway can be relayed through the signal transduction pathway, resulting in modulation of activities of other pathway members and modulating outcomes of such signal transduction such as affecting phenotypes and responses of a cell or organism to a signal. Diseases and disorders can involve misregulated or changes in modulation of signal transduction pathways. A goal of drug development is to target such misregulated pathways to restore more normal regulation in the signal transduction pathway.

[0007] Receptor tyrosine kinases (RTKs) are among the polypeptides involved in many signal transduction pathways. RTKs play a role in a variety of cellular processes, including cell division, proliferation, differentiation, migration and metabolism. RTKs can be activated by ligands. Such activation in turn activates events in a signal transduction pathway, such as by triggering autocrine or paracrine cellular signaling pathways, for example, activation of second messengers, which results in specific biological effects. Ligands for RTKs specifically bind to the cognate receptors.

[0008] RTKs have been implicated in a number of diseases including cancers such as breast and colorectal cancers, gastric carcinoma, gliomas and mesodermal-derived tumors. Disregulation of RTKs has been noted in several cancers. For example, breast cancer can be associated with amplified expression of p185-HER2. RTKs also have been associated with diseases of the eye, including diabetic retinopathies and macular degeneration. RTKs also are associated with regulating pathways involved in angiogenesis, including physiologic and tumor blood vessel formation. RTKs also are implicated in the regulation of cell proliferation, migration and survival.

[0009] The human epidermal growth factor receptor 2 gene (HER-2; also referred to as ErbB2) encodes a receptor tyrosine kinase that has been implicated as an oncogene. HER-2 has a major mRNA transcript of 4.5 Kb that encodes a polypeptide of about 185 kD (P185HER2). P185HER2 contains an extracellular domain, a transmembrane domain and an intracellular domain with tyrosine kinase activity. Several polypeptide forms are produced from the HER-2 gene and include polypeptides generated by proteolytic processing and forms generated from alternatively spliced RNAs. Herstatins and fragments thereof are HER-2 binding proteins, encoded by the HER-2 gene. Herstatins (also referred to as p68HER-2) are encoded by an alternatively spliced variant of the gene encoding the p185-HER2 receptor. For example, one Herstatin occurs in fetal kidney and liver, and includes a 79 amino acid intron-encoded insert, relative to the membrane-localized receptor, at the C terminus (see U.S. Pat. No. 6,414,130 and U.S. Published Application No. 20040022785). Several Herstatin variants have been identified (see, e.g., U.S. Pat. No. 6,414,130; U.S. Published Application No. 20040022785, U.S. application Ser. No. 09/234,208; U.S. application Ser. No. 09/506,079; published international application Nos. WO0044403 and WO0161356). Herstatins lack an epidermal growth factor (EGF) homology domain and contains part of the extracellular domain, typically the first 340 amino acids, of p185-HER2. Herstatins contain subdomains I and II of the human epidermal growth factor receptor, the HER-2 extracellular domain and a C-terminal domain encoded by an intron. The resulting herstatin polypeptides typically contain 419 amino acids (340 amino acids from subdomains I and II, plus 79 amino acids from intron 8). The herstatin proteins lack extracellular domain IV, as well as the transmembrane domain and kinase domain.

[0010] In contrast, positive acting EGFR ligands, such as the epidermal growth factor and transforming growth factor-alpha, possess such domains. Additionally, binding of a herstatin does not activate the receptor. Herstatins can inhibit members of the EGF-family of receptor tyrosine kinases as well as the insulin-like growth factor-1 (IGF-1) receptor and other receptors. Herstatins prevent the formation of productive receptor dimers (homodimers and heterodimers) required for transphosphorylation and receptor activation. Alternatively or additionally, herstatin can compete with a ligand for binding to the receptor terminus (see, U.S. Pat. No. 6,414,130; U.S. Published Application No. 20040022785, U.S. application Ser. No. 09/234,208; U.S. application Ser. No. 09/506,079; published international application Nos. WO0044403 and WO0161356).

[0011] The tumor necrosis factor family of receptors (TNFRs) is another example of a family of receptors involved in signal transduction and regulation. The TNF ligand and receptor family regulate a variety of signal transduction pathways including those involved in cell differentiation, activation, and viability. TNFRs contain an extra-cellular domain, including a ligand binding domain, a transmembrane domain and an intracellular domain that participates in signal transduction. Additionally, TNFRs are typically trimeric proteins that trimerize at the cell surface. TNFRs play a role in inflammatory diseases, central nervous system diseases, autoimmune diseases, airway hyper-responsiveness conditions such as in asthma, rheumatoid arthritis and inflammatory bowel disease. TNFRs also play a role in infectious diseases, such as viral infection.

[0012] The TNF family of receptors (TNFR) exhibit homology among the extra-cellular domains. Some of these receptors initiate apoptosis, some initiate cell proliferation and some initiate both activities. Signaling by this family requires clustering of the receptors by trimeric ligand and subsequent association of proteins with the cytoplasmic region of the receptors. The TNFR family contains a sub family with homologous cytoplasmic 80-amino-acid domains. This domain is referred to as a death domain (DD), so named because proteins that contain this domain are involved in apoptosis. The distinction between members of the TNFR family is exemplified by two TNFRs coded by distinct genes. TNFR1 (55 kDa) signals the initiation of apoptosis and the activation of the transcription factor NFkB. TNFR2 (75 kDa) functions to signal activation of NFkB but not the initiation of apoptosis. TNFR1 contains a DD; TNFR2 does not.

[0013] Because of their involvement in a variety of diseases and conditions, cell surface receptors (CSRs) such as RTKs and TNFRs are targets for therapeutic intervention. Small molecule therapeutics that target RTKs have been designed. While it may be possible to design small molecules as therapeutics that target cell surface receptors and/or other receptors, there, however, are a number of limitations with such strategies. Small molecules can be limited to interactions with one receptor and thus unable to address conditions where multiple family members may be misregulated. Small molecules also can be promiscuous and affect receptors other than the intended target. Additionally, some small molecules bind irreversibly or substantially irreversibly to the receptors (i.e. subnanomolar binding affinity). The merits of such approaches have not been validated. Antibodies against receptor and/or receptor ligands can be used as therapeutics. Antibody treatments, however, can result in an immune response in a subject and thus, such treatments often need extensive tailoring to avoid complications in treatment. Thus, there exists an unmet need for therapeutics for treatment of diseases, including cancers and other diseases involving undesirable cell proliferation and inflammatory reactions, involving cell surface receptors that exhibit RTK activity and/or other cell surface proteins. Accordingly, among the objects herein, it is an object to provide such therapeutics and methods for identifying or discovering candidate therapeutics and methods of treatment.

### SUMMARY

[0014] Therapeutic molecules for treating diseases and disorders involving the signal transduction pathways and other cell surface receptor interactions are provided. The therapeutic molecules particularly target RTKs that participated in signal transduction pathways, including those involved in angiogenesis and neovascularization and cell proliferation, particular aberrant angiogenesis, neovascularization and/or cell proliferation. Also provided are compositions containing the molecules and methods for treating diseases and conditions, particularly diseases that include or exhibit or are manifested by aberrant angiogenesis, neovascularization and/or cell proliferation. Also provided are methods for identifying candidate therapeutics and methods of treatment by administering therapeutic molecules and compositions. The therapeutic molecules can be used for treating any such disease or disorder and exhibit activity, whereby such treatment is effective. Diseases and disorders include proliferative disorders, including tumors, immune disorders and inflammatory disorders. Targets include cells involved in angiogenesis and neovascularization and cells involved in inflammatory responses, cancers and other such disorders. Activity includes modulation of the activity of a cell surface receptor, including RTKs and TNFRs, such as by directly altering the activity by virtue of interaction with the receptor or indirectly by interacting with ligands.

[0015] Included among the therapeutic molecules are polypeptide CSR isoforms or peptidomimetic variants thereof or allelic variants of the CSR. Among these molecules are those that modulate an activity or function of a cell surface receptor (CSR), particularly a CSR that is a cognate receptor of the isoforms. Activities and functions modulated by isoforms include, for example, one or more of: dimerization, homodimerization, heterodimerization, trimerization, kinase activity, receptor-associated kinase activity, receptor-associated protease activity, autophosphorylation of the receptor tyrosine kinase, transphosphorylation of the receptor tyrosine kinase, phosphorylation of a signal transduction molecule, ligand binding, competition with the receptor tyrosine kinase for ligand binding, signal transduction, interaction with a signal transduction molecule, induction of apoptosis, membrane association and membrane localization.

[0016] Among the therapeutic molecules provided herein are those that modulate the activity of cellular receptors of angiogenic factors (positive and negative), which serve as points of intervention in a plurality of disease processes. Examples of situations in which ‘too much’ angiogenesis is bad include angiogenesis that supplies blood to tumor foci, or to other sites of disease (such as to the human eye in diabetes). In these cases, therapeutic molecules provided herein that inhibit the process are employed.

[0017] Isoforms of cell surface receptors, including isoforms of receptor tyrosine kinases, and pharmaceutical compositions containing the isoforms are provided. Chimeras of and conjugates containing the cell surface receptors that contain a portion, such as an extracellular domain, from one cell surface receptor, and a second portion, particularly an intron-encoded portion, from a second cell surface protein also are provided. The isoforms modulate the activity of a cell surface receptor, either directly, such as by interacting therewith to alter an activity, such as receptor dimerization, or indirectly, such as by interaction with a receptor ligand. Methods for identifying and preparing isoforms of cell surface receptors including receptor tyrosine kinases are provided. Also provided are methods of treatment with the cell surface receptor isoforms.

[0018] Activities of the receptor tyrosine kinase (RTK) or TNFR (or other cell surface receptors) modulated by the therapeutic molecules provided herein include, but are not limited to, for example, one or more of dimerization, homodimerization, hetero-dimerization, trimerization, kinase activity, autophosphorylation of the receptor tyrosine kinase, transphosphorylation of the receptor tyrosine kinase, phosphorylation of a signal transduction molecule, ligand binding, competition with the receptor tyrosine kinase for ligand binding, signal transduction, interaction with a signal transduction molecule, induction of apoptosis, receptor-associated kinase activity, receptor-associated protease activity, membrane association and membrane localization. Modulation includes, for example, inhibition (such as activity as an antagonist) of an activity and also enhancement (such as activity as an agonist) of an activity. By virtue of modulation of such activity the effects of such receptors are modulated or otherwise modified.

[0019] The therapeutic molecules provided herein typically are polypeptides or peptidomimetics (including polypeptides with modified bonds) or other modified forms of polypeptides designed, for example, for improved bioavailability, delivery, stability, resistance to proteases and other properties. Contemplated are modifications of the molecules with changes that alter properties, such as bioavailability, protein stability and other such properties, for their use as therapeutics.

[0020] Exemplary of the molecules are polypeptides. Also included are allelic variants of any of the polypeptides. The allelic variants include any of the variants of the receptor, particularly variants in an extracellular domain, present in a population of the mammal in which a particular receptor occurs. Chimeric molecules, conjugates and conjugates of intron portions of the intron fusion proteins also are provided. The chimeric molecules and conjugates can include portions from molecules with different ligand binding and/or receptor interacting specificities. For example, conjugates or chimeras that contain an extracellular domain or portion thereof linked directly or indirectly to an intron region, such as an intron of a herstatin, are provided. The chimeras and conjugates include portions from CSR isoforms provided herein and known to those of skill in the art including any described in U.S. Provisional Application Ser. No. 60/571,289, U.S. Provisional Application Ser. No. 60/580,990, U.S. application Ser. No. 10/846,113, published International PCT application No. WO 05/016966, U.S. Pat. No. 6,414,130; U.S. Published Application No. 20040022785, U.S. application Ser. No. 09/234,208; U.S. application Ser. No. 09/506,079; published international application Nos. WO0044403 and WO0161356.

[0021] Isolated polypeptides and variants thereof are provided. The polypeptides are isoforms of cell surface receptors (CSR isoforms) and chimeras and conjugates thereof. Some CSR isoforms, such as intron fusion proteins, are missing all or part of a functional domain or other structural feature such that the activity of the domain is reduced or eliminated and/or a structure is altered compared to the full-length cognate receptor. Other examples include intron fusion proteins in which the rearrangements that occur during alternative splicing can result in either positive or negatively acting molecules. In particular, among the polypeptides provided herein are soluble or non-membrane bound forms of receptors. The polypeptides include a sequence of amino acids that has at least 80%, 85%, 90% or 95% sequence identity with a sequence of amino acids set forth in any of SEQ ID NOS: 91, 93, 95, 115, 117, 119, 121, 123, 125, 127, 129, 131, 133, 135, 137, 139, 141, 143, 145, 147, 149, 151, 153, 155, 168, 170, 172, 174, 176, 178, 180, 182, 184, 186, 188, 190, 192, 194, 196, 198, 200, 202, 204, 206, 208, 210, 212, 214, 216, 218, 220, 222, 224, and 226 and allelic variations thereof. Such homology is exhibited along at least 70%, 80%, 85%, 90%, 95%, 97% or 100% of the full-length of the polypeptide. Sequence identity is compared along the full length of the polypeptide represented by each SEQ ID to the full length sequence of the isolated polypeptide, and each of SEQ ID NOS: 91, 93, 95, 115, 117, 119, 121, 123, 125, 127, 129, 131, 133, 135, 137, 139, 141, 143, 145, 147, 149, 151, 153, 155, 168, 170, 172, 174, 176, 178, 180, 182, 184, 186, 188, 190, 192, 194, 196, 198, 200, 202, 204, 206, 208, 210, 212, 214, 216, 218, 220, 222, 224, and 226 is a cell surface receptor isoform. Exemplary of such polypeptides are isolated polypeptides containing the sequence of amino acids set forth in any of SEQ ID NOS: 91, 93, 95, 115, 117, 119, 121, 123, 125, 127, 129, 131, 133, 135, 137, 139, 141, 143, 145, 147, 149, 151, 153 and 155 as are isolated polypeptides that have the sequence of amino acids set forth in any of SEQ ID NOS: 91, 93, 95, 115, 117, 119, 121, 123, 125, 127, 129, 131, 133, 135, 137, 139, 141, 143, 145, 147, 149, 151, 153 155, 168, 170, 172, 174, 176, 178, 180, 182, 184, 186, 188, 190, 192, 194, 196, 198, 200, 202, 204, 206, 208, 210, 212, 214, 216, 218, 220, 222, 224, and 226. Also provided are chimeras of these molecules and also chimeras of these molecules and herstatins.

[0022] Provided are isolated polypeptides that are receptor isoforms and that contain at least one domain of a cell surface receptor linked to at least one amino acid encoded by an intron of a gene encoding a cognate cell surface receptor. The cell surface receptor is selected from among DDR1 (discoidin domain receptor), KIT (receptor for c-kit), FGFR-1, FGFR-2, FGFR-4, (fibroblast growth factor receptors 1, 2 and 4) TNFR1B (tumor necrosis factor receptor1B; also referred to as TNFRSF1B), VEGFR-1, VEGFR-2, VEGFR-3, (vascular endothelial growth factor receptors 1, 2, and 3), RON (recepteur d'origine nantais; also known as macrophage stimulating 1 receptor), MET (also known as hepatocyte growth factor receptor), TEK (endothelial-specific receptor tyrosine kinase), Tie-1 (tyrosine kinase with immunoglobulin and epidermal growth factor homology domains receptor), CSF1R (colony stimulating factor 1 receptor), PDGFR-B (platelet-derived growth factor receptor B), EphA1, EphA2, and EphB1 (erythropoietin-producing hepatocellular receptor A1, A2 and B1, respectively). Exemplary of such polypeptides are those that contain the sequence of amino acids selected from among the sequences of amino acids set forth in SEQ ID NOS: 91, 93, 95, 115, 117, 119, 121, 123, 125, 127, 129, 131, 133, 135, 137, 139, 141, 143, 145, 147, 149, 151, 153, 155, 168, 170, 172, 174, 176, 178, 180, 182, 184, 186, 188, 190, 192, 194, 196, 198, 200, 202, 204, 206, 208, 210, 212, 214, 216, 218, 220, 222, 224, and 226.

[0023] Also provided are isolated polypeptide that are cell surface receptors that lack at least part of a transmembrane domain such that the resulting polypeptide is not membrane localized or bound and it modulates an activity, including a biological activity, of the cell surface receptor. The polypeptides can include exon insertions. Among these are cell surface receptor isoforms selected from among isoforms of FGFR-4, KIT and TNFR. Exemplary of the isolated polypeptides are those that have at least 80%, 85%, 90%, 95%, 97%, or 100% sequence identity with a sequence of amino acids set forth in any of SEQ ID NOS: 91, 93, 95, 115, 117, 119, 121, 123, 125, 127, 129, 131, 133, 135, 137, 139, 141, 143, 145, 147, 149, 151, 153, 155, 168, 170, 172, 174, 176, 178, 180, 182, 184, 186, 188, 190, 192, 194, 196, 198, 200, 202, 204, 206, 208, 210, 212, 214, 216, 218, 220, 222, 224, and 226. Sequence identity is compared along the full length of each SEQ ID to the sequence of the full length of the isolated polypeptide. The isolated polypeptides can further lack a cell surface receptor cytoplasmic domain.

[0024] Also provided are isolated polypeptides that contain an intron-encoded sequence of amino acids and lack a cell surface receptor cytoplasmic domain. The intron is an intron and is selected from among nucleic acids KIT, FGFR-4, TNFR2, VEGFR-1, RON, TEK, Tie-1, and EphA1, or is an intron from any of SEQ ID NOS: 91, 93, 95, 121, 123, 129, 131, 133, 135, 137, 139, 141, 149, 151, or 153. Also provided are polypeptides that further lack a transmembrane domain. Among these are isolated polypeptides that modulate an activity or function of a cell surface receptor. These polypeptides include TNFR isoforms, such as, but not limited to, TNFR1 (also referred to as TNFRSF1A), TNFR2 and TNFRrp, the low-affinity nerve growth factor receptor, Fas antigen, CD40, CD27, CD30, 4-1BB, OX40, DR3, DR4, DR5, and herpes virus entry mediator (HVEM).

[0025] Also provided are chimeric intron fusion protein isoforms that contain an N-terminal portion that effects binding to a CSR linked to an intron, such as the intron or a portion thereof whereby the resulting chimera modulates, particularly, inhibits, an activity of one or more CSRs. The chimeras include N-terminal and/or intron portions of any of the isoforms provided herein and also a herstatin, linked to an intron from a different intron fusion protein isoform. The portions of the chimeras can be linked via a linker or via 2 or more amino acids. Alternatively, the chimera can be a chemical conjugate.

[0026] Also provided are CSR isoforms conjugates and chimeras in which the N-terminal portion and intron-encoded portion are linked directly or via a linker and are from the same or a different CSR isoforms, including any provided herein, a herstatin or any other CSR. The two portions can be linked via a linker, such as a polypeptide or chemical linker. The isoform conjugates modulate, typically inhibit, the activity of one or more CSRs. The CSRs include those that participate in signal transduction, particularly CSRs involved in pathways that participate in angiogenesis, inflammatory responses and cell proliferation (see, e.g., FIG. 1).

[0027] Provided herein are CSR isoforms that contain at least one domain of a CSR receptor and lack one or more amino acids of another domain of the CSR receptor such as the transmembrane domain and/or protein kinase domain, whereby an activity is reduced or abolished compared to the CSR. CSR isoforms include polypeptides that contain an intron-encoded sequence of amino acids, wherein the intron is from a gene encoding the CSR. For example, a CSR isoform can contain at least one domain of the CSR receptor operatively linked to at least one amino acid encoded by an intron of a gene encoding the CSR. Among the CSR isoforms provided herein are polypeptides that contain one or more domains of an Ephrin (Eph) receptor, a fibroblast growth factor (FGF) receptor, a DDR receptor, a MET receptor, a RON receptor, a TEK/TIE receptor, a VEGF receptor, PDGF receptor, CSF1 receptor, a KIT receptor and a TNFR receptor.

[0028] Provided herein are EphA isoforms. The isoforms are isolated polypeptides that contain at least one domain of an EphA receptor. The polypeptides contain an ephrin ligand binding domain and lack one or more amino acids corresponding to the transmembrane domain of the EphA receptor, whereby the membrane localization of the polypeptide is reduced or abolished compared to the EphA receptor. Included are polypeptides where the EphA receptor is selected from among EphA1, EphA2, EphA3, EphA4, EphA5, EphA6, EphA7, and EphA8. In one example, such polypeptides include a sequence as set forth in any one of SEQ ID NO: 253-260 or an allelic variant thereof. The allelic variant can be an allelic variation present in any one of SEQ ID NOS: 289-293. EphA isoforms include polypeptides that lack all or part of a protein kinase domain compared to the EphA receptor and/or that lack all or part of a Sterile Alpha Motif domain (SAM) compared to the EphA receptor.

[0029] In one example, an EphA isoform has at least one domain of an EphA1 receptor as set forth in SEQ ID NO:253. Such isoforms include EphA1 isoforms where the polypeptide lacks one or more amino acids of a protein kinase domain of the EphA1 receptor, whereby the kinase activity of the polypeptide is reduced or abolished compared to the EphA1 receptor. EphA1 isoforms also include polypeptides that have at least 80% sequence identity with a sequence of amino acids set forth in any of SEQ ID NOS: 149, 151 and 153 or that contain the amino acid sequence set forth in any of SEQ ID NOS: 149, 151 and 153 or an allelic variant thereof. Allelic variants include the allelic variations as set forth in SEQ ID NO: 289. EphA1 isoforms include polypeptides that contain the same number of amino acids as set forth in any of SEQ ID NOS: 149, 151 and 153.

[0030] Provided herein are EphA2 isoforms. EphA2 isoforms include at least one domain of an EphA2 receptor as set forth in SEQ ID NO:254, where the polypeptide lacks one or more amino acids of a transmembrane domain and protein kinase domain compared to the EphA2 receptor, whereby the membrane localization and the protein kinase activity of the polypeptide are reduced or abolished compared to the EphA2 receptor. EphA2 isoforms include polypeptides that contain one or more amino acids of a fibronectin domain compared to the EphA2 receptor. Examples of EphA2 isoforms also include polypeptides that have at least 80% sequence identity with a sequence of amino acids as set forth in SEQ ID NO: 168 or contains the sequence of amino acids set forth in SEQ ID NO: 168 or an allelic variant thereof. Allelic variants include, but are not limited to, allelic variations as set forth in SEQ ID NO: 290. EphA2 isoforms include isoforms that contain the same number of amino acids as set forth in the SEQ ID NO:168.

[0031] Also provided herein are EphB isoforms that include polypeptides lacking one or more amino acids of a transmembrane domain compared to the EphB receptor, whereby the membrane localization of the polypeptide is reduced or abolished compared to the EphB receptor. Among the EphB isoforms provided are those where the EphB receptor is selected from EphB1, EphB2, EphB3, EphB4, EphB5, and EphB6 and where the EphB receptor comprises a sequence as set forth in any one of SEQ ID NOS: 261-265 or an allelic variant thereof. Allelic variants include, but are not limited to, allelic variations set forth in SEQ ID NOS: 294-298. Exemplary EphB isoforms include isoforms that lack one or more amino acids of a protein kinase domain of the EphB receptor, whereby the protein kinase activity of the polypeptide is reduced or abolished compared to the EphB receptor and isoforms that lacks one or more amino acids of a Sterile Alpha Motif domain (SAM) of the EphB receptor. In one example, an EphB1 isoform includes an ephrin binding domain. EphB isoforms also include isoforms that lack one or more amino acids of a fibronectin domain of the EphB receptor. Among the EphB isoforms provided herein are isoforms that have at least 80% sequence identity with a sequence of amino acids as set forth in any of SEQ ID NOS: 155, 170, 172 and 174 and isoforms that contain the sequence of amino acids set forth in any of SEQ ID NOS: 155, 170, 172 and 174 or an allelic variant thereof. Allelic variants include, but are not limited to, allelic variations set forth in SEQ ID NOS: 294 and 297. EphB isoforms include isoforms that contain the same number of amino acids as set forth in any of SEQ ID NOS: 155, 170, 172 and 174.

[0032] FGFR isoforms are provided herein. Included are FGFR isoforms that contain at least one domain of an FGFR-1, wherein the polypeptide comprises an immunoglobulin domain corresponding to amino acids 253-357 of FGFR-1 set forth in SEQ ID NO:268 and lacks all of a transmembrane domain corresponding to amino acids 375-397 of the FGFR-1. FGFR isoforms also include isoforms that lack one or more amino acids of a protein kinase domain of FGFR-1, whereby the protein kinase activity of the polypeptide is reduced or abolished compared to the FGFR-1 and/or that contain one or more amino acids of an immunoglobulin domain corresponding to amino acids 156-246 of FGFR-1. FGFR isoforms provided include isoforms that have at least 80% sequence identity with a sequence of amino acids set forth in SEQ ID NOS: 119 or 176 and isoforms that contain any of SEQ ID NOS: 119 and 176 or an allelic variant thereof. Allelic variants include, but are not limited to, allelic variations set forth in SEQ ID NO: 300. FGFR-1 isoforms include isoforms that have the same number of amino acids as set forth in any of SEQ ID NOS: 119 and 176.

[0033] Also provided are FGFR-2 isoforms that have at least one domain of an FGFR-2 as set forth in SEQ ID NO: 269, where the polypeptide lacks a transmembrane domain and a protein kinase domain compared to FGFR-2, whereby the membrane localization and protein kinase activity of the polypeptide is reduced or abolished compared to FGFR-2. Such isoforms include polypeptides that have at least 80% sequence identity with a sequence of amino acids set forth in SEQ ID NOS: 178, 180, 182 and 184 and isoforms that contain the sequence of amino acids set forth in SEQ ID NOS: 178, 180, 182 or 184 or an allelic variant thereof. Allelic variants include, but are not limited to, allelic variations set forth in SEQ ID NO: 301. FGFR-2 isoforms include isoforms that have the same number of amino acids as set forth in any of SEQ ID NOS: 178, 180, 182 or 184. Exemplary FGFR-2 isoforms also include isoforms that lack an immunoglobulin domain corresponding to amino acids 41-125 of the FGFR-2.

[0034] FGFR-4 isoforms are provided herein that contain at least one domain of an FGFR-4, such as an immunoglobulin domain corresponding to amino acids 249-351 of the FGFR-4 set forth in SEQ ID NO:271 and lack a transmembrane domain and protein kinase domain of the FGFR-4, whereby the membrane localization and protein kinase activity of the polypeptide is reduced or abolished compared to FGFR-4. FGFR isoforms include isoforms that have at least 80% sequence identity with a sequence of amino acids set forth in SEQ ID NO: 121 and isoforms that contain the sequence of amino acids set forth in SEQ ID NO: 121 or an allelic variant thereof. Allelic variants include, but are not limited to, allelic variations set forth in SEQ ID NO:303. FGFR-4 isoforms include isoforms that have the same number of amino acids as set forth in SEQ ID NO: 121.

[0035] Provided herein are DDR1 isoforms, that are polypeptides that contain at least one domain of a DDR1 as set forth in SEQ ID NO: 250, where the polypeptide lacks a transmembrane domain and a protein kinase domain compared to the DDR1, whereby the membrane localization and protein kinase activity of the polypeptide is reduced or abolished compared to DDR1, and the polypeptide has at least 80% sequence identity with a sequence of amino acids set forth in SEQ ID NOS: 115 or 117. DDR1 isoforms include isoforms that contain the sequence of amino acids set forth in SEQ ID NOS: 115 or 117 or an allelic variant thereof, such as but not limited to the allelic variations as set forth in SEQ ID NO: 286. DDR1 isoforms include isoforms that have the same number of amino acids as set forth in SEQ ID NOS: 115 or 117.

[0036] Also provided herein are MET receptor isoforms that are polypeptides which contain at least one domain of a MET receptor operatively linked to at least one amino acid encoded by an intron of a gene encoding MET, where the polypeptide lacks a transmembrane domain, protein kinase domain and at least one additional domain compared to a MET receptor set forth in SEQ ID NO:274, whereby the membrane localization and protein kinase activity of the polypeptide is reduced or abolished compared to the MET receptor. MET receptor isoforms include isoforms where the additional domain lacking as compared to the MET receptor is a Sema domain, a plexin domain or an IPT/TIG domain. MET receptor isoforms include isoforms that have at least 80% sequence identity with a sequence of amino acids as set forth in any of SEQ ID NOS: 186, 188, 190, 192, 196, 198, 200, 202, 204, 206, 208 and 214 and isoforms that contain the sequence of amino acids set forth in any of SEQ ID NOS: 186, 188, 190, 192, 196, 198, 200, 202, 204, 206, 208 and 214 or an allelic variant thereof. Allelic variants include, but are not limited to, allelic variations set forth in SEQ ID NO:306. MET isoforms include isoforms that have the same number of amino acids as set forth in any of SEQ ID NOS: 186, 188, 190, 192, 196, 198, 200, 202, 204, 206, 208 and 214.

[0037] RON receptor isoforms are provided herein. RON receptor isoforms include polypeptides that have a plexin domain of the RON receptor as set forth in SEQ ID NO: 277; and lack a transmembrane domain of the RON receptor, whereby the membrane localization of the polypeptide is reduced or abolished compared to the RON receptor. RON receptor isoforms include isoforms that lack one or more amino acids of a protein kinase domain compared to the RON receptor as set forth in SEQ ID NO: 277, whereby the protein kinase activity of the polypeptide is reduced or abolished compared to the RON receptor and/or contain one or more amino acids of at least one IPT/TIG domain of the RON receptor. RON receptor isoforms include isoforms that have at least 80% sequence identity with a sequence of amino acids as set forth in any of SEQ ID NOS: 216, 218 and 220 and isoforms that contain the sequence of amino acids set forth in any of SEQ ID NOS: 216, 218 and 220 or an allelic variant thereof, such as but not limited to allelic variations set forth in SEQ ID NO: 308. RON receptor isoforms also include isoforms that have the same number of amino acids as set forth in any of SEQ ID NOS: 216, 218 and 220.

[0038] Provided herein are TEK isoforms that contain at least one domain of a TEK receptor as set forth in SEQ ID NO: 278, where the isoform lacks a transmembrane domain, and a protein kinase domain, whereby the membrane localization and protein kinase activity of the polypeptide are reduced or abolished compared to the TEK receptor; and lacks one or more amino acids of at least one fibronectin domain compared to the TEK receptor. TEK isoforms include isoforms where the fibronectin domain lacking corresponds to amino acids 444-529, 543-626, or 639-724 of SEQ ID NO: 278 and where one or more amino acids of the three fibronectin domains of the TEK receptor corresponding to amino acids 444-529, 543-626, and 639-724 of SEQ ID NO: 278 is lacking. TEK isoforms include isoforms that have at least 80% sequence identity with a sequence of amino acids as set forth in any of SEQ ID NOS: 131 and 133 and isoforms that contain the sequence of amino acids set forth in any of SEQ ID NOS: 131 and 133 or an allelic variant thereof, such as but not limited to allelic variations as set forth in SEQ ID NO: 309. TEK isoforms also include isoforms that contain the same number of amino acids as set forth in any of SEQ ID NOS: 131 and 133.

[0039] Tie-1 receptor isoforms are provided herein that contain all or part of at least one domain of a Tie-1 receptor as set forth in SEQ ID NO: 279, where the isoform lacks a transmembrane domain and a protein kinase domain compared to the Tie-1 receptor, whereby the membrane localization and protein kinase activity of the polypeptide are reduced or abolished compared to the Tie-1 receptor; and the isoform contains a sequence of amino acids set forth in any of SEQ ID NOS: 135, 137, 139, 141, 143 and 222 or an allelic variant thereof. Allelic variants include, but are not limited to, allelic variations set forth in SEQ ID NO: 310. Tie-1 receptor isoforms include isoforms that have the same number of amino acids as set forth in any of SEQ ID NOS: 135, 137, 139, 141, 143 and 222.

[0040] Provided herein are VEGFR isoforms. VEGFR isoforms include VEGFR-1 isoforms that contain a sequence of amino acids that has at least 80% sequence identity with the sequence of amino acids as set forth in SEQ ID NO: 123 and that lack a transmembrane domain and a protein kinase domain compared to the VEGFR-1 receptor set forth in SEQ ID NO: 282. Such isoforms include polypeptides that contain the sequence of amino acids set forth in SEQ ID NO: 123 or an allelic variant thereof and isoforms that contain the same number of amino acids as set forth in any of SEQ ID NO: 123. VEGFR isoforms include VEGFR-2 and VEGFR-3 isoforms that contain at least one domain of a VEGFR set forth in any of SEQ ID NOS:283 and 284, where the polypeptide lacks one or more amino acids of a transmembrane domain of the VEGFR, whereby the membrane localization of the polypeptide is reduced or abolished compared to the VEGFR. VEGFR-2 and VEGFR-3 isoforms also include isoforms that lack one or more amino acids of a protein kinase domain, whereby the protein kinase activity of the polypeptide is reduced or abolished compared to the VEGFR and isoforms that lack one or more amino acids of an immunoglobulin domain compared to the VEGFR. VEGFR-2 and VEGFR-3 isoforms include polypeptides that have at least 80% sequence identity with a sequence of amino acids as set forth in any of SEQ ID NOS: 125, 127, 224 and 226 and polypeptides that contain the sequence of amino acids set forth in any of SEQ ID NOS: 125, 127, 224 and 226 or an allelic variant thereof. Allelic variants can include, but are not limited to the allelic variations as set forth in SEQ ID NOS: 313 and 314. VEGFR-2 and VEGFR-3 isoforms also include isoforms that have the same number of amino acids as set forth in any of SEQ ID NOS: 125, 127, 224 and 226.

[0041] PDGFR isoforms are provided herein. Included are PDGFR isoforms that contain at least one domain of a PDGFR-B as set forth in SEQ ID NO: 276, wherein the polypeptide lacks one or more amino acids of a transmembrane domain of the PDGFR-B, whereby the membrane localization of the polypeptide is reduced or abolished compared to the PDGFR-B. PDGFR isoforms also include isoforms that lack one or more amino acids of a protein kinase domain of the PDGFR-B, whereby the protein kinase activity of the polypeptide is reduced or abolished compared to the PDGFR-B and isoforms that contain one or more amino acids of an immunoglobulin domain of the PDGFR-B. Also included are PDGFR isoforms that have at least 80% sequence identity with a sequence of amino acids set forth in SEQ ID NO: 147 and isoforms that contain the sequence of amino acids set forth in SEQ ID NO: 147 or an allelic variant thereof. Allelic variants can include, but are not limited to the allelic variations as set forth in SEQ ID NO: 307. PDGFR isoforms also include isoforms that have the same number of amino acids as set forth in SEQ ID NO: 147.

[0042] Also provided herein are CSF1R isoforms that contain at least one domain of a CSF1R as set forth in SEQ ID NO: 249, where the polypeptide lacks one or more amino acids of a transmembrane domain of the CSF1R, whereby the membrane localization of the polypeptide is reduced or abolished compared to the CSF1R. CSF1R isoforms also include isoforms that lack one or more amino acids of a protein kinase domain of the CSF1R, whereby the protein kinase activity of the polypeptide is reduced or abolished compared to the CSF1R and isoforms that contain one or more amino acids of an immunoglobulin domain of the CSF1R. Included are CSF1R isoforms that have at least 80% sequence identity with a sequence of amino acids set forth in SEQ ID NOS: 145 and isoforms that contain the sequence of amino acids set forth in SEQ ID NOS: 145 or an allelic variant thereof, such as but not limited to allelic variations as set forth in SEQ ID NO: 285. Exemplary CSF1R isoforms also include isoforms that contain the same number of amino acids as set forth in SEQ ID NO: 145.

[0043] KIT receptor isoforms are provided herein. Included are KIT receptor isoforms that contain at least one domain of a KIT receptor as set forth in SEQ ID NO:273 and lack one or more amino acids of a transmembrane domain and a protein kinase domain of the KIT receptor, whereby the membrane localization and protein kinase activity of the polypeptide are reduced or abolished compared to the KIT receptor and isoforms that contain at least one immunoglobulin domain of the KIT receptor. KIT isoforms include isoforms that have at least 80% sequence identity with a sequence of amino acids set forth in SEQ ID NOS: 93 and isoforms that contain the sequence of amino acids set forth in SEQ ID NO: 93 or an allelic variant thereof, such as but not limited to the allelic variations as set forth in SEQ ID NO: 305. KIT receptor isoforms include isoforms that have the same number of amino acids as set forth in SEQ ID NO: 93.

[0044] Provided herein are TNFR isoforms that contain at least one cysteine rich c6 domain of a TNFR as set forth in SEQ ID NOS:280 or 281 and lack all of the transmembrane domain of the TNFR, whereby the membrane localization of the polypeptide is reduced or abolished compared to the TNFR. TNFR isoforms include isoforms that contain at least two cysteine rich c6 domains of the TNFR. TNFR isoforms also include isoforms that have at least 80% sequence identity with a sequence of amino acids set forth in SEQ ID NO: 95 and isoforms that contain the sequence set forth in SEQ ID NO: 95 or an allelic variant thereof. Allelic variation includes but is not limited to allelic variations as set forth in SEQ ID NO: 312. TNFR isoforms also include isoforms that have the same number of amino acids as set forth in SEQ ID NO: 95.

[0045] The isolated polypeptides (e.g, CSR isoforms) can be encoded by a gene in a mammal, particularly a human, and can be isolated from a mammalian cell or prepared from nucleic acid cloned from such cell or can be synthesized from nucleic acid prepared by any means or can be synthesized as polypeptides. Exemplary mammals include humans and other primates, horses, cattle, dogs, cats and other domesticated animals, and rodents, such as rats and mice. The isolated polypeptides can be identified by the methods provided herein, known to those of skill in the art and/or also in, for example, copending application U.S. application Ser. No. 10/846,113 and published PCT application No. WO 2005/016966.

[0046] Also provided are pharmaceutical compositions that contain any of the isolated polypeptides provided herein and combinations thereof and combinations with other receptor isoforms, including a herstatin. Included among the compositions are those that contain a polypeptide that complexes with a receptor tyrosine kinase or a tumor necrosis factor receptor. The pharmaceutical compositions can be used to treat diseases that include inflammatory diseases, immune diseases, cancers, and other diseases that manifest aberrant angiogenesis or neovascularization or cell proliferation. Cancers include breast, lung, colon, gastric cancers, pancreatic cancers and others. Inflammatory diseases, include, for example, diabetic retinopathies and/or neuropathies and other inflammatory vascular complications of diabetes, autoimmune diseases, including autoimmune diabetes, atherosclerosis, Crohn's disease, diabetic kidney disease, cystic fibrosis, endometriosis, diabetes-induced vascular injury, inflammatory bowel disease, Alzheimer's disease and other neurodegenerative diseases, and other diseases known to those of skill in the art that involve proliferative responses, immune responses and inflammatory responses and others in which RTKs, particularly those noted in FIG. 1 and throughout the disclosure herein are implicated, involved or in which they participate.

[0047] Also provided are nucleic acid molecules encoding any of the polypeptides. Vectors containing the nucleic acid molecules are provided as are cells containing the vectors or nucleic acid molecules. Among the nucleic acid molecules provided are those that contain an intron and an exon, where the intron contains a stop codon; the nucleic acid molecule encodes an open reading frame that spans an exon intron junction; and the open reading frame terminates at the stop codon in the intron. The intron can encode one or more amino acids of the encoded polypeptide or the codon can be a first codon (and possibly the only codon) in the intron.

[0048] Also provided are chimeric polypeptides that contain a portion, typically one domain, of one cell surface receptor (CSR) isoform and a portion of a second, different CSR isoform, typically at least one domain. The chimeric isoform modulates the activity of one or more tyrosine kinase receptor. Each portion contains at least 4, 5, 6, 7, 8, 10, 12, 15, 20, 25, 30, 50, 100, 150 or more amino acid residues. At least one of the isoforms is an isoform provided herein.

[0049] Also provided are nucleic acid molecules that contain a sequence of nucleotides that has at least 90% sequence identity with a sequence of nucleotides set forth in any of SEQ ID NOS: 90, 92, 94, 114, 116, 118, 120, 122, 124, 126, 128, 130, 132, 134, 136, 138, 140, 142, 144, 146, 148, 150, 152, 154, 167, 169, 171, 173, 175, 177, 179, 181, 183, 185, 187, 189, 191, 193, 195, 197, 199, 201, 203, 205, 207, 209, 211, 213, 215, 217, 219, 221, 223, and 225 or an allelic variant thereof. Sequence identity is compared along the full length of each SEQ ID to the full length sequence of the isolated nucleic acid molecule, and each of SEQ ID NOS: 90, 92, 94, 114, 116, 118, 120, 122, 124, 126, 128, 130, 132, 134, 136, 138, 140, 142, 144, 146, 148, 150, 152, 154, 167, 169, 171, 173, 175, 177, 179, 181, 183, 185, 187, 189, 191, 193, 195, 197, 199, 201, 203, 205, 207, 209, 211, 213, 215, 217, 219, 221, 223, and 225 is a cell surface receptor isoform. In particular, nucleic acid molecules containing the sequence of nucleotides set forth in any of SEQ ID NOS: 90, 92, 94, 114, 116, 118, 120, 122, 124, 126, 128, 130, 132, 134, 136, 138, 140, 142, 144, 146, 148, 150, 152, 154, 167, 169, 171, 173, 175, 177, 179, 181, 183, 185, 187, 189, 191, 193, 195, 197, 199, 201, 203, 205, 207, 209, 211, 213, 215, 217, 219, 221, 223, and 225 are provided. Also provided are vectors containing any of the nucleic acid molecules and cells containing the nucleic acid molecules or vectors.

[0050] Pharmaceutical compositions containing the nucleic acid molecules and/or vectors are provided. Such compositions can be used in methods of gene therapy, including in vivo methods and ex vivo methods.

[0051] Methods of treating a disease or condition by administering any of the pharmaceutical compositions are provided. Diseases or conditions include, but are not limited to, for example, cancers, inflammatory diseases, infectious diseases, angiogenesis-related diseases or diseases involving aberrant angiogenesis or neovascularization, cell proliferative conditions, immune disorders and neurodegenerative diseases. Also included are methods of treatment where the pharmaceutical compositions contain one or more polypeptides that inhibit(s) angiogenesis, cell proliferation, cell migration, viral entry, viral infection, tumor cell growth or tumor cell metastasis.

[0052] Exemplary of diseases and disorders are any of rheumatoid arthritis, multiple sclerosis and posterior intraocular inflammation, uveitic disorders, ocular surface inflammatory disorders, neovascular disease, proliferative vitreoretinopathy, atherosclerosis, endometriosis, rheumatoid arthritis, hemangioma, diabetes mellitus, diabetic retinopathies, inflammatory bowel disease, Crohn's disease, psoriasis, Alzheimer's disease, lupus, vascular stenosis, restenosis, inflammatory joint disease, atherosclerosis, urinary obstructive syndromes, asthma, carcinoma, lymphoma, blastoma, sarcoma, and leukemia, lymphoid malignancies, squamous cell cancer, small-cell lung cancer, non-small cell lung cancer, adenocarcinoma of the lung, squamous carcinoma of the lung, cancer of the peritoneum, hepatocellular cancer, gastric cancer, stomach cancer, gastrointestinal cancer, pancreatic cancer, glioblastoma, cervical cancer, ovarian cancer, liver cancer, bladder cancer, hepatoma, breast cancer, colon cancer, rectal cancer, colorectal cancer, endometrial or uterine carcinoma, salivary gland carcinoma, kidney/renal cancer, prostate cancer, vulval cancer, thyroid cancer, hepatic carcinoma, anal carcinoma, penile carcinoma, and head and neck cancer and other cancers. Other diseases or conditions include those caused by or mediated by or involving a virus or a parasite, such as, but not limited to, Myxoma virus, Vaccinia virus, Tanapox virus, Epstein-Barr virus, Herpes simplex virus, Cytomegalovirus, Herpesvirus saimiri, Hepatitis B virus, African swine fever virus, Parovirus, Human Immune deficiency virus (HIV), Hepatitis C virus, Influenza virus, Respiratory syncytial virus, Measles virus, Vesicular stomatitis virus, Dengue virus and Ebola virus.

[0053] Also provided are combinations and kits containing the combinations, with optional instructions and/or reagents. These combinations contain compositions that contain two and one or more different cell surface receptor isoforms and/or a therapeutic drug or a cell surface receptor isoform and a therapeutic drug. The isoforms and/or drugs can be in separate compositions or in a single composition or one composition containing two or more of the agents and the other containing the other agents or other such formal. Methods of treatment by administering the components of the combination are provided. Each component can be administered separately, simultaneously, intermittently, in a single composition or combinations thereof.

### BRIEF DESCRIPTION OF THE FIGURE

[0054] FIG. 1 depicts angiogenic and endothelial cell maintenance pathways. Target points for CSR isoform modulation of one or more pathway steps are indicated. In particular, the figure depicts steps in the formation, maintenance and remodeling of the vasculature. These include the role(s) of VEGF's in recruitment of circulating endothelial precursors (CEPs), the roles of angioipoietin-2 in vessel destabilization.

### DETAILED DESCRIPTION

### A. Definitions

[0055] Unless defined otherwise, all technical and scientific terms used herein have the same meaning as is commonly understood by one of skill in the art to which the invention(s) belong. All patents, patent applications, published applications and publications, GENBANK sequences, websites and other published materials referred to throughout the entire disclosure herein, unless noted otherwise, are incorporated by reference in their entirety. In the event that there is a plurality of definitions for terms herein, those in this section prevail. Where reference is made to a URL or other such identifier or address, it is understood that such identifiers can change and particular information on the internet can come and go, but equivalent information is known and can be readily accessed, such as by searching the internet and/or appropriate databases. Reference thereto evidences the availability and public dissemination of such information.

[0056] As used herein, a cell surface receptor (CSR) is a protein that is expressed on the surface of a cell and typically includes a transmembrane domain or other moiety that anchors it to the surface of a cell. As a receptor it binds to ligands that mediate or participate in an activity of the cell surface receptor, such as signal transduction or ligand internalization. Cell surface receptors include, but are not limited to, single transmembrane receptors and G-protein coupled receptors. Receptor tyrosine kinases, such as growth factor receptors, also are among such cell surface receptors.

[0057] As used herein, a receptor tyrosine kinase (RTK) refers to a protein, typically a glycoprotein, that is a member of the growth factor receptor family of proteins. Growth factor receptors are typically involved in cellular processes including cell growth, cell division, differentiation, metabolism and cell migration. RTKs also are known to be involved in cell proliferation, differentiation and determination of cell fate as well as tumor growth. RTKs have a conserved domain structure including an extracellular domain, a membrane-spanning (transmembrane) domain and an intracellular tyrosine kinase domain. Typically, the extracellular domain binds to a polypeptide growth factor or a cell membrane-associated molecule or other ligand. The tyrosine kinase domain is involved in positive and negative regulation of the receptor.

[0058] Receptor tyrosine kinases are grouped into families based on, for example, structural arrangements of sequence motifs in their extracellular domains. Structural motifs include, but are not limited to repeats of regions of: immunoglobulin, fibronectin, cadherin, epidermal growth factor and kringle repeats. Classification by structural motifs has identified greater than 16 families of RTKs, each with a conserved tyrosine kinase domain. Examples of RTKs include, but are not limited to, erythropoietin-producing hepatocellular (EPH) receptors, epidermal growth factor (EGF) receptors, fibroblast growth factor (FGF) receptors, platelet-derived growth factor (PDGF) receptors, vascular endothelial growth factor (VEGF) receptors, cell adhesion RTKs (CAKs), Tie/Tek receptors, insulin-like growth factor (IGF) receptors, and insulin receptor related (IRR) receptors. Exemplary genes encoding RTKs include, but are not limited to, ErbB2, ErbB3, DDR1, DDR2, EGFR, EphA1, EphA8, FGFR-2, FGFR-4, FLT1 (fms-related tyrosine kinase 1 receptor; also known as VEGFR-1), FLK1 (also known as VEGFR-2), MET, PDGFR-A, PDGFR-B, and TEK (also known as TIE-2).

[0059] Dimerization of RTKs activates the catalytic tyrosine kinase domain of the receptor and tyrosine autophosphorylation. Autophosphorylation in the kinase domain maintains the tyrosine kinase domain in an activated state. Autophosphorylation in other regions of the protein influences interactions of the receptor with other cellular proteins. In some RTKs, ligand binding to the extracellular domain leads to dimerization of the receptor. In some RTKs, the receptor can dimerize in the absence of ligand. Dimerization also can be increased by receptor overexpression.

[0060] As used herein, a tumor necrosis factor receptor (TNFR) refers to a member of a family of receptors that have a characteristic repeating extracellular cysteine-rich motif such as found in TNFR1 and TNFR2. TNFRs also have a variable intracellular domain that differs between members of the TNFR family. The TNFR family of receptors includes, but is not limited to, TNFR1, TNFR2, TNFRrp, the low-affinity nerve growth factor receptor, Fas antigen, CD40, CD27, CD30, 4-1BB, OX40, DR3, DR4, DR5, and herpesvirus entry mediator (HVEM). Ligands for TNFRs include TNF-α, lymphotoxin, nerve growth factor, Fas ligand, CD40 ligand, CD27 ligand, CD30 ligand, 4-1BB ligand, OX40 ligand, APO3 ligand, TRAIL and LIGHT. TNFRs include an extracellular domain, including a ligand binding domain, a transmembrane domain and an intracellular domain that participates in signal transduction. TNFRs are typically trimeric proteins that trimerize at the cell surface.

[0061] As used herein, an isoform of a cell surface receptor (also referred to herein as a CSR isoform), such as an isoform of a receptor tyrosine kinase, refers to a receptor that lacks a domain or portion thereof sufficient to alter an activity of the receptor or modulate an activity compared to a wildtype and/or predominant form of the receptor or lacks a structural feature, such as a domain. Thus, a CSR isoform refers to a receptor that lacks a domain or portion of a domain sufficient to alter an activity, typically a biological activity, of the receptor. A CSR isoform lacks a domain or portion of a domain sufficient to alter or modulate an activity of the receptor. A CSR isoform can include an isoform that has one or more biological activities that are altered from the receptor; for example, an isoform can include the alteration of the extracellular domain of p185-HER2, altering the isoform from a positively acting regulatory polypeptide of the receptor to a negatively acting regulatory polypeptide of the isoform, e.g. from a receptor domain into a ligand. Generally, an activity is altered in an isoform at least 0.1, 0.5, 1, 2, 3, 4, 5, or 10 fold compared to a wildtype and/or predominant form of the receptor. Typically, an activity is altered by at least 2, 5, 10, 20, 50, 100 or 1000 fold or more. In one embodiment, alteration of an activity is a reduction in the activity. With reference to an isoform, alteration of activity refers to difference in activity between the particular isoform, which is shortened, compared to the unshortened form of the receptor. Alteration of an activity includes an enhancement or a reduction of activity. In one embodiment, an alteration of an activity is a reduction in biological activity; the reduction can be at least 0.1 0.5 1, 2, 3, 4, 5, or 10 fold compared to a wildtype and/or predominant form of the receptor. Typically, a biological activity is reduced 5, 10, 20, 50, 100 or 1000 fold or more.

[0062] As used herein, reference to modulating the activity of a cell surface receptor means that a CSR interacts in some manner with the receptor and activity, such as ligand binding or dimerization or other signal-transduction-related activity is altered.

[0063] As used herein, reference to a CSR isoform with altered activity refers to an alteration in an activity by virtue of the different structure or sequence of the CSR isoform compared to a cognate receptor.

[0064] As used herein, an intron fusion protein refers to an isoform that lacks one or more domain(s) or portion of one or more domain(s) resulting in an alteration of an activity of a receptor. The activity can be altered by the intron fusion protein directly, such as by interaction with the receptor, or indirectly by interacting with a receptor ligand or co-factor or other modulator of receptor activity. Intron fusion proteins isolated from cells or tissues or that have the sequence of such polypeptides isolated from cells or tissues, are “natural.” Those that do not occur naturally but that are synthesized or prepared by linking a molecule to an intron such that the resulting construct modulates the activity of a CSR are “synthetic.” Included among intron fusion proteins are cell surface receptor isoforms that lack one or more domain(s) or portion of one or more domain(s) resulting in an alteration of an activity of a receptor. In addition, an intron fusion protein contains one or more amino acids not encoded by an exon (with reference to the predominant or wildtype form of a receptor), operatively linked to exon-encoded amino acids. Generally such isoforms are shortened compared to a wildtype or predominant form encoded by a CSR gene. They, however, can include insertions or other modifications in the exon portion and, thus, be of the same size or larger than the predominant form. Each, however, includes an intron-encoded portion (at least one amino acid, generally at least, 2, 3, 4, 5, 8, 10, 15, 20, 25, 30, 35, 40, 45, 50, 55, 60, 65, 70, 75 and more amino acids). An intron fusion protein can be encoded by an alternatively spliced RNA and/or RNA molecules identified in silico by identifying potential splice sites and then producing such molecules by recombinant methods. Typically, an intron fusion protein is shortened by the presence of one or more stop codons in an intron fusion protein-encoding RNA that are not present in the corresponding sequence of an RNA encoding a wildtype or predominant form of a CSR polypeptide. Addition of amino acids and/or a stop codon can result in an intron fusion protein that differs in size and sequence from a wildtype or predominant form of a polypeptide.

[0065] Intron fusion proteins for purposes herein include natural combinatorial and synthetic intron fusion proteins. A natural intron fusion protein refers to a polypeptide that is encoded by an alternatively spliced RNA molecule that contains one or more amino acids encoded by an intron linked to one or more portions of the polypeptide encoded by one or more exons of a gene. Alternatively spliced mRNA is isolated or can be prepared synthetically by joining splice donor and acceptor sites in a gene. A natural intron fusion protein contains one or more amino acids and/or a stop codon encoded by an intron sequence and generally occurs in cells and/or tissues, but can be identified from a gene by identifying splice donor and acceptor sites and identifying possible encoded spliced variants. A combinatorial intron fusion protein refers to a polypeptide that is shortened compared to a wildtype or predominant form of a polypeptide. Typically, the shortening removes one or more domains or a portion thereof from a polypeptide such that an activity is altered. Combinatorial intron fusion proteins often mimic a natural intron fusion protein in that one or more domains or a portion thereof is/are deleted in a natural intron fusion protein derived from the same gene or derived from a gene in a related gene family. Those that do not occur naturally but that are synthesized or prepared by linking a molecule to an intron such that the resulting construct modulates the activity of a CSR are “synthetic.”

[0066] As used herein, natural with reference to intron fusion proteins, refers to any protein, polypeptide or peptide or fragment thereof (by virtue of the presence of the appropriate splice acceptor/donor sites) that is encoded within the genome of an animal and/or is produced or generated in an animal or that could be produced from a gene. Natural intron fusion proteins include allelic variants. Intron fusion proteins can be modified post-translationally.

[0067] As used herein, an exon refers to a nucleic acid molecule containing sequence of nucleotides that is transcribed into RNA and is represented in a mature form of RNA, such as mRNA (messenger RNA), after splicing and other RNA processing. An mRNA contains one or more exons operatively linked. Exons can encode polypeptides or a portion of a polypeptide. Exons also can contain non-translated sequences for example, translational regulatory sequences. Exon sequences are often conserved and exhibit homology among gene family members.

[0068] As used herein, an intron refers to a sequence of nucleotides that is transcribed into RNA and is then typically removed from the RNA by splicing to create a mature form of an RNA, for example, an mRNA. Typically, nucleotide sequences of introns are not incorporated into mature RNAs, nor are intron sequences or a portion thereof typically translated and incorporated into a polypeptide. Splice signal sequences such as splice donors and acceptors are used by the splicing machinery of a cell to remove introns from RNA. It is noteworthy that an intron in one splice variant can be an exon (i.e., present in the spliced transcript) in another variant. Hence, spliced mRNA encoding an intron fusion protein can include an exon(s) and introns.

[0069] As used herein, splicing refers to a process of RNA maturation where introns in the mRNA are removed and exons are operatively linked to create a messenger RNA (mRNA).

[0070] As used herein, alternative splicing refers to the process of producing multiple mRNAs from a gene. Alternate splicing can include operatively linking less than all the exons of a gene, and/or operatively linking one or more alternate exons that are not present in all transcripts derived from a gene.

[0071] As used herein, exon deletion refers to an event of alternative RNA splicing that produces a nucleic acid molecule that lacks at least one exon compared to an RNA molecule encoding a wildtype or predominant form of a polypeptide. An RNA molecule that has a deleted exon can be produced by such alternative splicing or by any other method, such as an in vitro method to delete the exon.

[0072] As used herein, exon insertion, refers to an event of alternative RNA splicing that produces a nucleic acid molecule that contains at least one exon not typically present in an RNA molecule encoding a wildtype or predominant form of a polypeptide. An RNA molecule that has an inserted exon can be produced by such alternative splicing or by any other method, such as an in vitro method to add or insert the exon.

[0073] As used herein, exon extension refers to an event of alternative RNA splicing that produces a nucleic acid molecule that contains at least one exon that is greater in length (number of nucleotides contained in the exon) than the corresponding exon in an RNA encoding a wildtype or predominant form of a polypeptide. An RNA molecule that has an extended exon can be produced by such alternative splicing or by any other method, such as an in vitro method to extend the exon. In some instances, as described herein, an mRNA produced by exon extension encodes an intron fusion protein.

[0074] As used herein, exon truncation refers to an event of alternative RNA splicing that produces a nucleic acid molecule that contains a truncation or shortening of one or more exons such that the one or more exons are shorter in length (number of nucleotides) compared to a corresponding exon in an RNA molecule encoding a wildtype or predominant form of a polypeptide. An RNA molecule that has a truncated exon can be produced by such alternative splicing or by any other method, such as an in vitro method to truncate the exon.

[0075] As used herein intron retention refers to an event of alternative RNA splicing that produces a nucleic acid molecule that contains an intron or a portion thereof operatively linked to one or more exons. An RNA molecule that retains an intron or portion thereof can be produced by such alternative splicing or by any other method, such as in vitro method to produce an RNA molecule with a retained exon. In some cases, as described herein, an mRNA molecule produced by intron retention encodes an intron fusion protein.

[0076] As used herein, a gene, also referred to as a gene sequence, refers to a sequence of nucleotides transcribed into RNA (introns and exons), including nucleotide sequence that encodes at least one polypeptide. A gene includes sequences of nucleotides that regulate transcription and processing of RNA. A gene also includes regulatory sequences of nucleotides such as promoters and enhancers, and translation regulation sequences.

[0077] As used herein, a splice site refers to one or more nucleotides within the gene that participate in the removal of an intron and/or the joining of an exon. Splice sites include splice acceptor sites and splice donor sites.

[0078] As used herein, cognate receptor with reference to the isoforms provided herein refers to the receptor that is encoded by the same gene as the particular isoform. Generally, the cognate receptor also is a predominant form in a particular cell or tissue. For example, herstatin is encoded by a splice variant of the pre-mRNA which encodes p185-HER2 (ErbB2 receptor). Thus, p185-HER2 is the cognate receptor for herstatin.

[0079] As used herein, a wildtype form, for example, a wildtype form of a polypeptide, refers to a polypeptide that is encoded by a gene. Typically a wildtype form refers to a gene (or RNA or protein derived therefrom) without mutations or other modifications that alter function or structure; wildtype forms include allelic variation among and between species.

[0080] As used herein, a predominant form, for example, a predominant form of a polypeptide, refers to a polypeptide that is the major polypeptide produced from a gene. A “predominant form” varies from source to source. For example, different cells or tissue types can produce different forms of polypeptides, for example, by alternative splicing and/or by alternative protein processing. In each cell or tissue type, a different polypeptide can be a “predominant form.”

[0081] As used herein, a domain refers to a portion (typically a sequence of three or more, generally 5 or 7 or more amino acids) of a polypeptide chain that can form an independently folded structure within a protein made up of one or more structural motifs (e.g. combinations of alpha helices and/or beta strands connected by loop regions) and/or that is recognized by virtue of a functional activity, such as kinase activity. A protein can have one, or more than one, distinct domain. For example, a domain can be identified, defined or distinguished by homology of the sequence therein to related family members, such as homology and motifs that define an extracellular domain. In another example, a domain can be distinguished by its function, such as by enzymatic activity, e.g. kinase activity, or an ability to interact with a biomolecule, such as DNA binding, ligand binding, and dimerization. A domain independently can exhibit a biological function or activity such that the domain independently or fused to another molecule can perform an activity, such as, for example proteolytic activity or ligand binding. A domain can be a linear sequence of amino acids or a non-linear sequence of amino acids from the polypeptide. Many polypeptides contain a plurality of domains. For example, receptor tyrosine kinases typically include, an extracellular domain, a membrane-spanning (transmembrane) domain and an intracellular tyrosine kinase domain.

[0082] As used herein, a polypeptide lacking all or a portion of a domain refers a polypeptide that has a deletion of one or more amino acids or all of the amino acids of a domain compared to a cognate polypeptide. Amino acids deleted in a polypeptide lacking all or part of a domain need not be contiguous amino acids within the domain of the cognate polypeptide. Polypeptides that lack all or a part of a domain can include the loss or reduction of an activity of the polypeptide compared to the activity of a cognate polypeptide or loss of a structure in the polypeptide.

[0083] For example, if a cognate receptor has a transmembrane domain, then a receptor isoform polypeptide lacking all or a part of the transmembrane domain can have a deletion of 1, 2, 3, 4, 5, 6, 7, 8, 9, 10, 11, 12, 13, 14, 15, 16, 17, 18, 19, 20 or more amino acids between amino acids corresponding to the same amino acid positions in the cognate receptor.

[0084] As used herein, a polypeptide that contains a domain refers to a polypeptide that contains a complete domain with reference to the corresponding domain of a cognate receptor. A complete domain is determined with reference to the definition of that particular domain within a cognate polypeptide. For example, a receptor isoform comprising a domain refers to an isoform that contains a domain corresponding to the complete domain as found in the cognate receptor. If a cognate receptor, for example, contains a transmembrane domain of 21 amino acids between amino acid positions 400-420, then a receptor isoform that comprises such transmembrane domain, contains a 21 amino acid domain that has substantial identity with the 21 amino acid domain of the cognate receptor. Substantial identity refers to a domain that can contain allelic variation and conservative substitutions as compared to the domain of the cognate receptor. Domains that are substantially identical do not have deletions, non-conservative substitutions or insertions of amino acids compared to the domain of the cognate receptor. Domains (i.e., a furin domain, an Ig-like domain) often are identified by virtue of structural and/or sequence homology to domains in particular proteins.

[0085] Such domains are known to those of skill in the art who can identify such. For exemplification herein, definitions are provided, but it is understood that it is well within the skill in the art to recognize particular domains by name. If needed appropriate software can be employed to identify domains.

[0086] As used herein, an extracellular domain is a portion of the cell surface receptor that occurs on the surface of the receptor and includes the ligand binding site(s). In one example, an ephrin receptor ligand binding domain (EPH_{—}1bd) is the portion of the polypeptide that mediates binding of a protein receptor to an ephrin ligand. Typically, EphA receptors bind to GPI-anchored ephrin-A ligands, while EphB receptors bind to ephrin-B proteins that have a transmembrane and cytoplasmic domain.

[0087] A Receptor L domain (RLD), such as for example in ErbB2, is another example of a domain that includes a ligand binding site. Each L domain contains a single-stranded right hand beta-helix that can associate with a second L domain to form a three-dimensional bilobal structure surrounding a central space of sufficient size to accommodate a ligand molecule.

[0088] As used herein, a furin domain is a domain recognized as such by those of skill in the art and is a cysteine rich region. Furin is a type 1 transmembrane serine protease. A furin domain functions as a cleavage site for furin protease.

[0089] As used herein a Sema domain is a domain recognized as such by those of skill in the art and is a receptor recognition and binding module. The Sema domain is characterized by a conserved set of cysteine residues, which form four disulfide bonds to stabilize the structure. The Sema domain fold is a variation of a β propeller topology, with seven blades radially arranged around a central axis. Each blade contains a four-stranded antiparallel β sheet. The Sema domain uses a ‘loop and hook’ system to close the circle between the first and the last blades. The blades are constructed sequentially with an N-terminal β-strand closing the circle by providing the outermost strand of the seventh (C-terminal) blade. The β-propeller is further stabilized by an extension of the N-terminus, providing an additional, fifth β-strand on the outer edge of blade 6.

[0090] As used herein, a plexin domain is a domain recognized as such by those of skill in the art and contains a cysteine rich repeat. Plexins are receptors that as a complex interact with membrane-bound semaphorins. The plexins contain three domains with homology to c-met, the receptor for scatter factor-induced motility, but they lack the intrinsic tyrosine kinase activity of c-met. Intracellullarly, invariant arginines identify a plexin domain with homology to guanosine triphosphatase-activating proteins. A protein can contain one, or more than one, plexin domain. As described herein, the MET receptor contains a single plexin domain.

[0091] As used herein, the F 5/8 type C domain is a domain recognized as such by those of skill in the art and is a domain that exhibits a distorted jelly-roll β-barrel motif, containing eight antiparallel strands arranged in two β-sheets. The lower part of the β-barrel is characterized by a preponderance of basic residues and three adjacent protruding loops. The portion of the polypeptide that forms the F 5/8 type C domain contains two conserved cysteines, which link the extremities of the domain by a disulfide bond.

[0092] As used herein an Ig-like domain is a domain recognized as such by those of skill in the art and is a domain containing folds of beta strands forming a compact folded structure of two beta sheets stabilized by hydrophobic interactions and sandwiched together by an intra-chain disulfide bond. In one example, an Ig-like C-type domain contains seven beta strands arranged as four-strand plus three-strand so that four beta strands form one beta sheet and three beta strands form the second beta sheet. In another example, an Ig-like V-type domain contains nine beta strands arranged as four beta strands plus five beta strands (Janeway C. A. et al. (eds): Immunobiology—the immune system in health and disease, 5th edn. New York, Garland Publishing, 2001.).

[0093] As used herein, a fibronectin type-III (FN3) domain is a domain recognized as such by those of skill in the art and contains a conserved β sandwich fold with one β sheet containing four strands and the other sheet containing three strands. The folded structure of an FN3 domain and an Ig-like domain are topologically very similar except the FN3 domain lacks a conserved disulfide bond. The portion of the polypeptide encoding an FN3 domain also is characterized by a short stretch of amino acids containing an Arg-Gly-Asp (RGD) that mediates interactions with cell adhesion molecules to modulate thrombosis, inflammation, and tumor metastasis. In one example, EphA1 contains two FN3 domains.

[0094] As used herein, an IPT/TIG domain is a domain recognized as such by those of skill in the art and has an immunoglobulin fold-like domain. Proteins contain one, or more than one, IPT/TIG domain. IPT/TIG domains are found in plexins, transcription factors, and extracellular regions of receptor proteins, such as for example the cell surface receptors MET and RON as described herein, that appear to regulate cell proliferation and cellular adhesion (Johnson C A et al, Journal of Medical Genetics, 40:311-319, (2003)).

[0095] As used herein, an EGF domain is a domain recognized as such by those of skill in the art and contains a repeat pattern involving a number of conserved cysteine residues which are important to the three-dimensional structure of the protein, and hence its recognition by receptors and other molecules. The EGF domain as described herein contains six cysteine residues which are involved in forming disulfide bonds. An EGF domain forms a two-stranded β sheet followed by a loop to a C-terminal short two-stranded sheet. Subdomains between the conserved cysteines vary in length. Repeats of EGF domains are typically found in the extracellular domain of membrane-bound proteins, such as for example in Tie-1 as described herein. A variation of the EGF domain is the laminin (Lam) EGF domain which, as described herein, has eight instead of six conserved cysteines and therefore is longer than the average EGF module and contains a further disulfide bond C-terminal of the EGF-like region.

[0096] As used herein, a C6 domain is a cysteine rich domain of typically about 110 to 160 amino acids in the N-terminal region of the polypeptide. It can be subdivided into four, or in some cases three or more, modules of about 40 residues containing 6 conserved cysteines that participate in intrachain disulfide bonds. A protein can have one, or more than one, C6 domain. As described herein, for example, TNFR2 contains three C6 domains.

[0097] As used herein, a transmembrane domain spans the plasma membrane anchoring the receptor and generally includes hydrophobic residues.

[0098] As used herein, a cytoplasmic domain is a domain that participates in signal transduction and occurs in the cytoplasmic portion of a transmembrane cell surface receptor. In one example, the cytoplasmic domain can include a protein kinase (PK) domain. A PK domain is recognized as such by those of skill in the art and is a domain that contains a conserved catalytic core. The conserved catalytic core is recognized to have a glycine-rich stretch of residues in the vicinity of a lysine residue in the N-terminal extremity of the domain, which has been shown to be involved in ATP binding, and an aspartic acid residue in the central part of the catalytic domain, which is important for the catalytic activity of the enzyme. Typically, the PK domain can be a serine/threonine protein kinase or a tyrosine protein kinase domain depending on the substrate specificity of the receptor domain such that, for example, a protein containing a tyrosine kinase domain phosphorylates substrate proteins on tyrosine residues whereas, for example, a protein containing a serine/threonine protein kinase domain phosphorylates substrate proteins on serine or threonine residues.

[0099] As used herein, sterile α motif (SAM) domain is considered a protein-protein interaction module. A SAM domain is recognized as such by those of skill in the art and is a domain that spreads over typically about 70 residues to form an independently folded structure arranged in a small five-helix bundle with two large interfaces. In one example, such as for example in the SAM domain of EphB2, each of the interfaces is able to form dimers. The ability of the SAM domain to form homo- or hetero-oligomers creates a binding surface that mediates protein protein interactions.

[0100] As used herein, an allelic variant or allelic variation references to a polypeptide encoded by a gene that differs from a reference form of a gene (i.e. is encoded by an allele). Typically the reference form of the gene encodes a wildtype form and/or predominant form of a polypeptide from a population or single reference member of a species. Typically, allelic variants, which include variants between and among species typically have at least 80%, 90% or greater amino acid identity with a wildtype and/or predominant form from the same species; the degree of identity depends upon the gene and whether comparison is interspecies or intraspecies. Generally, intraspecies allelic variants have at least about 80%, 85%, 90% or 95% identity or greater with a wildtype and/or predominant form, including 96%, 97%, 98%, 99% or greater identity with a wildtype and/or predominant form of a polypeptide.

[0101] As used herein, modification in reference to modification of a sequence of amino acids of a polypeptide or a sequence of nucleotides in a nucleic acid molecule and includes deletions, insertions, and replacements of amino acids and nucleotides, respectively.

[0102] As used herein, an open reading frame refers to a sequence of nucleotides that encodes a functional polypeptide or a portion thereof, typically at least about fifty amino acids. An open reading frame can encode a full-length polypeptide or a portion thereof. An open reading frame can be generated by operatively linking one or more exons or an exon and intron, when the stop codon is in the intron and all or a portion of the intron is in a transcribed mRNA.

[0103] As used herein, a polypeptide refers to two or more amino acids covalently joined. The terms “polypeptide” and “protein” are used interchangeably herein.

[0104] As used herein, truncation or shortening with reference to the shortening of a nucleic acid molecule or protein, refers to a sequence of nucleotides or amino acids that is less than full-length compared to a wildtype or predominant form of the protein or nucleic acid molecule.

[0105] As used herein, a reference gene refers to a gene that can be used to map introns and exons within a gene. A reference gene can be genomic DNA or portion thereof, that can be compared with, for example, an expressed gene sequence, to map introns and exons in the gene. A reference gene also can be a gene encoding a wildtype or predominant form of a polypeptide.

[0106] As used herein, a family or related family of proteins or genes refers to a group of proteins or genes, respectively that have homology and/or structural similarity and/or functional similarity with each other.

[0107] As used herein, a premature stop codon is a stop codon occurring in the open reading frame of a sequence before the stop codon used to produce or create a full-length form of a protein, such as a wildtype or predominant form of a polypeptide. The occurrence of a premature stop codon can be the result of, for example, alternative splicing and mutation.

[0108] As used herein, an expressed gene sequence refers to any sequence of nucleotides transcribed or predicted to be transcribed from a gene. Expressed gene sequences include, but are not limited to, cDNAs, ESTs, and in silico predictions of expressed sequences, for example, based on splice site predictions and in silico generation of spliced sequences.

[0109] As used herein, an expressed sequence tag (EST) is a sequence of nucleotides generated from an expressed gene sequence. ESTs are generated by using a population of mRNA to produce cDNA. The cDNA molecules can be produced for example, by priming from the polyA tail present on mRNAs. cDNA molecules also can be produced by random priming using one or more oligonucleotides which prime cDNA synthesis internally in mRNAs. The generated cDNA molecules are sequenced and the sequences are typically stored in a database. An example of an EST database is dbEST found online at ncbi.nlm.nih.gov/dbEST. Each EST sequence is typically assigned a unique identifier and information such as the nucleotide sequence, length, tissue type where expressed, and other associated data is associated with the identifier.

[0110] As used herein, a kinase is a protein that is able to phosphorylate a molecule, typically a biomolecule, including macromolecules and small molecules. For example, the molecule can be a small molecule, or a protein. Phosphorylation includes auto-phosphorylation. Some kinases have constitutive kinase activity. Other kinases require activation. For example, many kinases that participate in signal transduction are phosphorylated. Phosphorylation activates their kinase activity on another biomolecule in a pathway. Some kinases are modulated by a change in protein structure and/or interaction with another molecule. For example, complexation of a protein or binding of a molecule to a kinase can activate or inhibit kinase activity.

[0111] As used herein, designated refers to the selection of a molecule or portion thereof as a point of reference or comparison. For example, a domain can be selected as a designated domain for the purpose of constructing polypeptides that are modified within the selected domain. In another example, an intron can be selected as a designated intron for the purpose of identifying RNA transcripts that include or exclude the selected intron.

[0112] As used herein, modulate and modulation refer to a change of an activity of a molecule, such as a protein. Exemplary activities include, but are not limited to, biological activities, such as signal transduction and protein phosphorylation. Modulation can include an increase in the activity (i.e., up-regulation agonist activity) a decrease in activity (i.e., down-regulation or inhibition) or any other alteration in an activity (such as periodicity, frequency, duration, kinetics). Modulation can be context dependent and typically modulation is compared to a designated state, for example, the wildtype protein, the protein in a constitutive state, or the protein as expressed in a designated cell type or condition.

[0113] As used herein, inhibit and inhibition refer to a reduction in an activity, such as a biological activity, relative to the uninhibited activity.

[0114] As used herein, a composition refers to any mixture. It can be a solution, a suspension, liquid, powder, a paste, aqueous, non-aqueous or any combination thereof.

[0115] As used herein, a combination refers to any association between or among two or more items. The combination can be two or more separate items, such as two compositions or two collections, can be a mixture thereof, such as a single mixture of the two or more items, or any variation thereof. The elements of a combination are generally functionally associated or related. A kit is a packaged combination that optionally includes instructions for use of the combination or elements thereof and/or optionally include other reagents and vessels and tools and devices employed in the methods for which the kits are intended.

[0116] As used herein, a pharmaceutical effect refers to an effect observed upon administration of an agent intended for treatment of a disease or disorder or for amelioration of the symptoms thereof.

[0117] As used herein, treatment means any manner in which the symptoms of a condition, disorder or disease or other indication, are ameliorated or otherwise beneficially altered.

[0118] As used herein therapeutic effect means an effect resulting from treatment of a subject that alters, typically improves or ameliorates the symptoms of a disease or condition or that cures a disease or condition. A therapeutically effective amount refers to the amount of a composition, molecule or compound which results in a therapeutic effect following administration to a subject.

[0119] As used herein, the term “subject” refers to animals, including mammals, such as human beings. As used herein, a patient refers to a human subject.

[0120] As used herein, an activity refers to a function or functioning or changes in or interactions of a biomolecule, such as polypeptide. Exemplary, but not limiting of such activities are: complexation, dimerization, multimerization, receptor-associated kinase activity or other enzymatic or catalytic activity, receptor-associated protease activity, phosphorylation, dephosphorylation, autophosphorylation, ability to form complexes with other molecules, ligand binding, catalytic or enzymatic activity, activation including auto-activation and activation of other polypeptides, inhibition or modulation of another molecule's function, stimulation or inhibition of signal transduction and/or cellular responses such as cell proliferation, migration, differentiation, and growth, degradation, membrane localization, membrane binding, and oncogenesis. An activity can be assessed by assays described herein and by any suitable assays known to those of skill in the art, including, but not limited to in vitro assays, including cell-based assays, in vivo assays, including assays in animal models for particular diseases. Biological activities refer to activities exhibited in vivo. For purposes herein, biological activity refers to any of the activities exhibited by a polypeptide provided herein.

[0121] As used herein, angiogenic diseases (or angiogenesis-related diseases) are diseases in which the balance of angiogenesis is altered or the timing thereof is altered. Angiogenic diseases include those in which an alteration of angiogenesis, such as undesirable vascularization, occurs. Such diseases include, but are not limited to cell proliferative disorders, including cancers, diabetic retinopathies and other diabetic complications, inflammatory diseases, endometriosis and other diseases in which excessive vascularization is part of the disease process, including those noted above.

[0122] As used herein, complexation refers to the interaction of two or more molecules such as two molecules of a protein to form a complex. The interaction can be by noncovalent and/or covalent bonds and includes, but is not limited to, hydrophobic and electrostatic interactions, Van der Waals forces and hydrogen bonds. Generally, protein-protein interactions involve hydrophobic interactions and hydrogen bonds. Complexation can be influenced by environmental conditions such as temperature, pH, ionic strength and pressure, as well as protein concentrations.

[0123] As used herein, dimerization refers to the interaction of two molecules of the same type, such as two molecules of a receptor. Dimerization includes homodimerization where two identical molecules interact. Dimerization also includes heterodimerization of two different molecules, such as two subunits of a receptor and dimerization of two different receptor molecules. Typically, dimerization involves two molecules that interact with each other through interaction of a dimerization domain contained in each molecule.

[0124] As used herein, a ligand antagonist refers to the activity of a CSR isoform that antagonizes an activity that results from ligand interaction with a CSR.

[0125] As used herein, in silico refers to research and experiments performed using a computer. In silico methods include, but are not limited to, molecular modeling studies, biomolecular docking experiments, and virtual representations of molecular structures and/or processes, such as molecular interactions.

[0126] As used herein, biological sample refers to any sample obtained from a living or viral source or other source of macromolecules and biomolecules, and includes any cell type or tissue of a subject from which nucleic acid or protein or other macromolecule can be obtained. The biological sample can be a sample obtained directly from a biological source or to sample that is processed For example, isolated nucleic acids that are amplified constitute a biological sample. Biological samples include, but are not limited to, body fluids, such as blood, plasma, serum, cerebrospinal fluid, synovial fluid, urine and sweat, tissue and organ samples from animals and plants and processed samples derived therefrom. Also included are soil and water samples and other environmental samples, viruses, bacteria, fungi algae, protozoa and components thereof.

[0127] As used herein, macromolecule refers to any molecule having a molecular weight from the hundreds up to the millions. Macromolecules include peptides, proteins, nucleotides, nucleic acids, and other such molecules that are generally synthesized by biological organisms, but can be prepared synthetically or using recombinant molecular biology methods.

[0128] As used herein, a biomolecule is any compound found in nature, or derivatives thereof. Exemplary biomolecules include but are not limited to: oligonucleotides, oligonucleosides, proteins, peptides, amino acids, peptide nucleic acids (PNAs), oligosaccharides and monosaccharides.

[0129] As used herein, the term “nucleic acid” refers to single-stranded and/or double-stranded polynucleotides such as deoxyribonucleic acid (DNA), and ribonucleic acid (RNA) as well as analogs or derivatives of either RNA or DNA. Also included in the term “nucleic acid” are analogs of nucleic acids such as peptide nucleic acid (PNA), phosphorothioate DNA, and other such analogs and derivatives or combinations thereof. Nucleic acid can refer to polynucleotides such as deoxyribonucleic acid (DNA) and ribonucleic acid (RNA). The term also includes, as equivalents, derivatives, variants and analogs of either RNA or DNA made from nucleotide analogs, single (sense or antisense) and double-stranded polynucleotides. Deoxyribonucleotides include deoxyadenosine, deoxycytidine, deoxyguanosine and deoxythymidine. For RNA, the uracil base is uridine.

[0130] As used herein, the term “polynucleotide” refers to an oligomer or polymer containing at least two linked nucleotides or nucleotide derivatives, including a deoxyribonucleic acid (DNA), a ribonucleic acid (RNA), and a DNA or RNA derivative containing, for example, a nucleotide analog or a “backbone” bond other than a phosphodiester bond, for example, a phosphotriester bond, a phosphoramidate bond, a phophorothioate bond, a thioester bond, or a peptide bond (peptide nucleic acid). The term “oligonucleotide” also is used herein essentially synonymously with “polynucleotide,” although those in the art recognize that oligonucleotides, for example, PCR primers, generally are less than about fifty to one hundred nucleotides in length.

[0131] Polynucleotides can include nucleotide analogs, for example, mass modified nucleotides, which allow for mass differentiation of polynucleotides; nucleotides containing a detectable label such as a fluorescent, radioactive, luminescent or chemiluminescent label, which allow for detection of a polynucleotide; or nucleotides containing a reactive group such as biotin or a thiol group, which facilitates immobilization of a polynucleotide to a solid support. A polynucleotide also can contain one or more backbone bonds that are selectively cleavable, for example, chemically, enzymatically or photolytically. For example, a polynucleotide can include one or more deoxyribonucleotides, followed by one or more ribonucleotides, which can be followed by one or more deoxyribonucleotides, such a sequence being cleavable at the ribonucleotide sequence by base hydrolysis. A polynucleotide also can contain one or more bonds that are relatively resistant to cleavage, for example, a chimeric oligonucleotide primer, which can include nucleotides linked by peptide nucleic acid bonds and at least one nucleotide at the 3′ end, which is linked by a phosphodiester bond or other suitable bond, and is capable of being extended by a polymerase. Peptide nucleic acid sequences can be prepared using well-known methods (see, for example, Weiler et al. Nucleic acids Res. 25: 2792-2799 (1997)).

[0132] As used herein, synthetic, in the context of a synthetic sequence and synthetic gene refers to a nucleic acid molecule that is produced by recombinant methods and/or by chemical synthesis methods.

[0133] As used herein, oligonucleotides refer to polymers that include DNA, RNA, nucleic acid analogues, such as PNA, and combinations thereof. For purposes herein, primers and probes are single-stranded oligonucleotides or are partially single-stranded oligonucleotides.

[0134] As used herein, primer refers to an oligonucleotide containing two or more deoxyribonucleotides or ribonucleotides, generally more than three, from which synthesis of a primer extension product can be initiated. Experimental conditions conducive to synthesis include the presence of nucleoside triphosphates and an agent for polymerization and extension, such as DNA polymerase, and a suitable buffer, temperature and pH.

[0135] As used herein, production by recombinant means by using recombinant DNA methods means the use of the well-known methods of molecular biology for expressing proteins encoded by cloned DNA.

[0136] As used herein, “isolated,” with reference to a molecule, such as a nucleic acid molecule, oligonucleotide, polypeptide or antibody, indicates that the molecule has been altered by the hand of man from how it is found in its natural environment. For example, a molecule produced by and/or contained within a recombinant host cell is considered “isolated.” Likewise, a molecule that has been purified, partially or substantially, from a native source or recombinant host cell, or produced by synthetic methods, is considered “isolated.” Depending on the intended application, an isolated molecule can be present in any form, such as in an animal, cell or extract thereof; dehydrated, in vapor, solution or suspension; or immobilized on a solid support.

[0137] As used herein, the term “vector” refers to a nucleic acid molecule capable of transporting another nucleic acid to which it has been linked. One type of vector is an episome, i.e., a nucleic acid capable of extra chromosomal replication. Vectors include those capable of autonomous replication and/or expression of nucleic acids to which they are linked. Vectors capable of directing the expression of genes to which they are operatively linked are referred to herein as “expression vectors.” In general, expression vectors are often in the form of “plasmids,” which are generally circular double stranded DNA loops that, in their vector form are not bound to the chromosome. “Plasmid” and “vector” are used interchangeably as the plasmid is the most commonly used form of vector. Other such other forms of expression vectors that serve equivalent functions and that become known in the art subsequently hereto.

[0138] As used herein, “transgenic animal” refers to any animal, generally a non-human animal, e.g., a mammal, bird or an amphibian, in which one or more of the cells of the animal contain heterologous nucleic acid introduced by way of human intervention, such as by transgenic techniques well known in the art. The nucleic acid is introduced into the cell, directly or indirectly by introduction into a precursor of the cell, by way of deliberate genetic manipulation, such as by microinjection or by infection with a recombinant virus. This molecule can be stably integrated within a chromosome, i.e., replicate as part of the chromosome, or it can be extrachromosomally replicating DNA. In the typical transgenic animals, the transgene causes cells to express a recombinant form of a protein.

[0139] As used herein, a reporter gene construct is a nucleic acid molecule that includes a nucleic acid encoding a reporter operatively linked to a transcriptional control sequences. Transcription of the reporter gene is controlled by these sequences. The activity of at least one or more of these control sequences is directly or indirectly regulated by another molecule such as a cell surface protein, a protein or small molecule involved in signal transduction within the cell. The transcriptional control sequences include the promoter and other regulatory regions, such as enhancer sequences, that modulate the activity of the promoter, or control sequences that modulate the activity or efficiency of the RNA polymerase. Such sequences are herein collectively referred to as transcriptional control elements or sequences. In addition, the construct can include sequences of nucleotides that alter translation of the resulting mRNA, thereby altering the amount of reporter gene product.

[0140] As used herein, “reporter” or “reporter moiety” refers to any moiety that allows for the detection of a molecule of interest, such as a protein expressed by a cell, or a biological particle. Typical reporter moieties include, for example, fluorescent proteins, such as red, blue and green fluorescent proteins (see, e.g., U.S. Pat. No. 6,232,107, which provides GFPs from Renilla species and other species), the lacZ gene from E. coli, alkaline phosphatase, chloramphenicol acetyl transferase (CAT) and other such well-known genes. For expression in cells, nucleic acid encoding the reporter moiety, referred to herein as a “reporter gene,” can be expressed as a fusion protein with a protein of interest or under to the control of a promoter of interest.

[0141] As used herein, the phrase “operatively linked” with reference to sequences of nucleic acids means the nucleic acid molecules or segments thereof are covalently joined into one piece of nucleic acid such as DNA or RNA, whether in single or double stranded form. The segments are not necessarily contiguous, rather two or more components are juxtaposed so that the components are in a relationship permitting them to function in their intended manner. For example, segments of RNA (exons) can be operatively linked such as by splicing, to form a single RNA molecule. In another example, DNA segments can be operatively linked, whereby control or regulatory sequences on one segment control permit expression or replication or other such control of other segments. Thus, in the case of a regulatory region operatively linked to a reporter or any other polynucleotide, or a reporter or any polynucleotide operatively linked to a regulatory region, expression of the polynucleotide/reporter is influenced or controlled (e.g., modulated or altered, such as increased or decreased) by the regulatory region. For gene expression, a sequence of nucleotides and a regulatory sequence(s) are connected in such a way to control or permit gene expression when the appropriate molecular signal, such as transcriptional activator proteins, are bound to the regulatory sequence(s). Operative linkage of heterologous nucleic acid, such as DNA, to regulatory and effector sequences of nucleotides, such as promoters, enhancers, transcriptional and translational stop sites, and other signal sequences, refers to the relationship between such DNA and such sequences of nucleotides. For example, operative linkage of heterologous DNA to a promoter refers to the physical relationship between the DNA and the promoter such that the transcription of such DNA is initiated from the promoter by an RNA polymerase that specifically recognizes, binds to and transcribes the DNA in reading frame.

[0142] As used herein, the term “operatively linked” with reference to amino acids in polypeptides refers to covalent linkage (direct or indirect) of the amino acids. For example, when used in the context of the phrase “at least one domain of a cell surface receptor operatively linked to at least one amino acid encoded by an intron of a gene encoding a cell surface receptor,” means that the amino acids of a domain from a cell surface receptor are covalently joined to amino acids encoded by an intron from a cell surface receptor gene such as by linkage, typically direct linkage via peptide bonds, or the linkage also can be effected indirectly, such as via a linker or via non-peptidic linkage. Hence, a polypeptide that contains at least one domain of a cell surface receptor operatively linked to at least one amino acid encoded by an intron of a gene encoding a cell surface receptor can be an intron fusion protein. It contains one or more amino acids that are not found in a predominant form of the receptor but rather contains a portion that is encoded by an intron of the gene that encodes the predominant form. These one or more amino acids are encoded by an intron sequence of the gene encoding the cell surface receptor. Nucleic acids encoding such polypeptides can be produced when an intron sequence is spliced or otherwise covalently joined in-frame to an exon sequence that encodes a domain of a cell surface receptor. Translation of the nucleic acid molecule produces a polypeptide where the amino acid(s) of the intron sequence are covalently joined to a domain of the cell surface receptor. They also can be produced synthetically by linking a portion containing an exon to a portion containing an intron, including chimeric intron fusion proteins in which the exon is encoded by a gene for a different cell surface receptor isoform from the intron portion.

[0143] As used herein, the phrase “generated from a nucleic acid” in reference to the generating of a polypeptide, such as an isoform and intron fusion protein, includes the literal generation of a polypeptide molecule and the generation of an amino acid sequence of a polypeptide from translation of the nucleic acid sequence into a sequence of amino acids.

[0144] As used herein, a promoter region refers to the portion of DNA of a gene that controls transcription of the DNA to which it is operatively linked. The promoter region includes specific sequences of DNA that are sufficient for RNA polymerase recognition, binding and transcription initiation. This portion of the promoter region is referred to as the promoter. In addition, the promoter region includes sequences that modulate this recognition, binding and transcription initiation activity of the RNA polymerase. These sequences can be cis acting or can be responsive to trans acting factors. Promoters, depending upon the nature of the regulation, can be constitutive or regulated.

[0145] As used herein, regulatory region means a cis-acting nucleotide sequence that influences expression, positively or negatively, of an operatively linked gene. Regulatory regions include sequences of nucleotides that confer inducible (i.e., require a substance or stimulus for increased transcription) expression of a gene. When an inducer is present or at increased concentration, gene expression can be increased. Regulatory regions also include sequences that confer repression of gene expression (i.e., a substance or stimulus decreases transcription). When a repressor is present or at increased concentration gene expression can be decreased. Regulatory regions are known to influence, modulate or control many in vivo biological activities including cell proliferation, cell growth and death, cell differentiation and immune modulation. Regulatory regions typically bind to one or more trans-acting proteins, which results in either increased or decreased transcription of the gene.

[0146] Particular examples of gene regulatory regions are promoters and enhancers. Promoters are sequences located around the transcription or translation start site, typically positioned 5′ of the translation start site. Promoters usually are located within 1 Kb of the translation start site, but can be located further away, for example, 2 Kb, 3 Kb, 4 Kb, 5 Kb or more, up to and including 10 Kb. Enhancers are known to influence gene expression when positioned 5′ or 3′ of the gene, or when positioned in or a part of an exon or an intron. Enhancers also can function at a significant distance from the gene, for example, at a distance from about 3 Kb, 5 Kb, 7 Kb, 10 Kb, 15 Kb or more.

[0147] Regulatory regions also include, in addition to promoter regions, sequences that facilitate translation, splicing signals for introns, maintenance of the correct reading frame of the gene to permit in-frame translation of mRNA, stop codons, leader sequences and fusion partner sequences, internal ribosome binding sites (IRES), elements for the creation of multigene or polycistronic messages, and polyadenylation signals to provide proper polyadenylation of the transcript of a gene of interest and can be optionally included in an expression vector.

[0148] As used herein, the “amino acids,” which occur in the various amino acid sequences appearing herein, are identified according to their well-known, three-letter or one-letter abbreviations (see Table 1). The nucleotides, which occur in the various DNA fragments, are designated with the standard single-letter designations used routinely in the art.

[0149] As used herein, “amino acid residue” refers to an amino acid formed upon chemical digestion (hydrolysis) of a polypeptide at its peptide linkages. The amino acid residues described herein are generally in the “L” isomeric form. Residues in the “D” isomeric form can be substituted for any L-amino acid residue, as long as the desired functional property is retained by the polypeptide. NH2 refers to the free amino group present at the amino terminus of a polypeptide. COOH refers to the free carboxy group present at the carboxyl terminus of a polypeptide. In keeping with standard polypeptide nomenclature described in J. Biol. Chem., 243:3552-59 (1969) and adopted at 37 C.F.R. §§ 1.821-1.822, abbreviations for amino acid residues are shown in Table 1:

TABLE 1
Table of Correspondence

SYMBOL

| 1-Letter | 3-Letter | AMINO ACID |
|---|---|---|
| Y | Tyr | tyrosine |
| G | Gly | glycine |
| F | Phe | phenylalanine |
| M | Met | methionine |
| A | Ala | alanine |
| S | Ser | serine |
| I | Ile | isoleucine |
| L | Leu | leucine |
| T | Thr | threonine |
| V | Val | valine |
| P | Pro | proline |
| K | Lys | lysine |
| H | His | Histidine |
| Q | Gln | Glutamine |
| E | Glu | glutamic acid |
| Z | Glx | Glu and/or Gln |
| W | Trp | Tryptophan |
| R | Arg | Arginine |
| D | Asp | aspartic acid |
| N | Asn | Asparagines |
| B | Asx | Asn and/or Asp |
| C | Cys | Cysteine |
| X | Xaa | Unknown or other |

[0150] All sequences of amino acid residues represented herein by a formula have a left to right orientation in the conventional direction of amino-terminus to carboxyl-terminus. In addition, the phrase “amino acid residue” is defined to include the amino acids listed in the Table of Correspondence modified, non-natural and unusual amino acids. Furthermore, it should be noted that a dash at the beginning or end of an amino acid residue sequence indicates a peptide bond to a further sequence of one or more amino acid residues or to an amino-terminal group such as NH₂ or to a carboxyl-terminal group such as COOH.

[0151] In a peptide or protein, suitable conservative substitutions of amino acids are known to those of skill in this art and generally can be made without altering a biological activity of a resulting molecule. Those of skill in this art recognize that, in general, single amino acid substitutions in non-essential regions of a polypeptide do not substantially alter biological activity (see, e.g., Watson et al. Molecular Biology of the Gene, 4th Edition, 1987, The Benjamin/Cummings Pub. co., p. 224).

[0152] Such substitutions may be made in accordance with those set forth in TABLE 2 as follows:

TABLE 2

| Original | Conservative |
|---|---|
| residue | substitution |
| Ala (A) | Gly; Ser |
| Arg (R) | Lys |
| Asn (N) | Gln; His |
| Cys (C) | Ser |
| Gln (Q) | Asn |
| Glu (E) | Asp |
| Gly (G) | Ala; Pro |
| His (H) | Asn; Gln |
| Ile (I) | Leu; Val |
| Leu (L) | Ile; Val |
| Lys (K) | Arg; Gln; Glu |
| Met (M) | Leu; Tyr; Ile |
| Phe (F) | Met; Leu; Tyr |
| Ser (S) | Thr |
| Thr (T) | Ser |
| Trp (W) | Tyr |
| Tyr (Y) | Trp; Phe |
| Val (V) | Ile; Leu |

Other substitutions also are permissible and can be determined empirically or in accord with other known conservative or non-conservative substitutions.

[0153] As used herein, a peptidomimetic is a compound that mimics the conformation and certain stereochemical features of a biologically active form of a particular peptide. In general, peptidomimetics are designed to mimic certain desirable properties of a compound, but not the undesirable properties, such as flexibility, that lead to a loss of a biologically active conformation and bond breakdown. Peptidomimetics can be prepared from biologically active compounds by replacing certain groups or bonds that contribute to the undesirable properties with bioisosteres. Bioisosteres are known to those of skill in the art. For example the methylene bioisostere CH2S has been used as an amide replacement in enkephalin analogs (see, e.g., Spatola (1983) pp. 267-357 in Chemistry and Biochemistry of Amino Acids, Peptides, and Proteins, Weinstein, Ed. volume 7, Marcel Dekker, New York). Morphine, which can be administered orally, is a compound that is a peptidomimetic of the peptide endorphin. For purposes herein, polypeptides in which one or more peptidic bonds that form the backbone of a polypeptide are replaced with bioisoteres are peptidomimetics.

[0154] As used herein, “similarity” between two proteins or nucleic acids refers to the relatedness between the sequence of amino acids of the proteins or the nucleotide sequences of the nucleic acids. Similarity can be based on the degree of identity and/or homology of sequences of residues and the residues contained therein. Methods for assessing the degree of similarity between proteins or nucleic acids are known to those of skill in the art. For example, in one method of assessing sequence similarity, two amino acid or nucleotide sequences are aligned in a manner that yields a maximal level of identity between the sequences. “Identity” refers to the extent to which the amino acid or nucleotide sequences are invariant. Alignment of amino acid sequences, and to some extent nucleotide sequences, also can take into account conservative differences and/or frequent substitutions in amino acids (or nucleotides). Conservative differences are those that preserve the physico-chemical properties of the residues involved. Alignments can be global (alignment of the compared sequences over the entire length of the sequences and including all residues) or local (the alignment of a portion of the sequences that includes only the most similar region or regions).

[0155] “Identity” per se has an art-recognized meaning and can be calculated using published techniques. (See, e.g.: Computational Molecular Biology, Lesk, A. M., ed., Oxford University Press, New York, 1988; Biocomputing: Informatics and Genome Projects, Smith, D. W., ed., Academic Press, New York, 1993; Computer Analysis of Sequence Data, Part I, Griffin, A. M., and Griffin, H. G., eds., Humana Press, New Jersey, 1994; Sequence Analysis in Molecular Biology, von Heinje, G., Academic Press, 1987; and Sequence Analysis Primer, Gribskov, M. and Devereux, J., eds., M Stockton Press, New York, 1991). While there exist a number of methods to measure identity between two polynucleotide or polypeptides, the term “identity” is well known to skilled artisans (Carillo, H. & Lipton, D., SIAM J Applied Math 48:1073 (1988)).

[0156] As used herein, sequence identity compared along the full length of a polypeptide compared to another polypeptide refers to the percentage of identity of an amino acid in a polypeptide along its full-length. For example, if a polypeptide A has 100 amino acids and polypeptide B has 95 amino acids, identical to amino acids 1-95 of polypeptide A, then polypeptide B has 95% identity when sequence identity is compared along the full length of a polypeptide A compared to full length of polypeptide B. As discussed below, and known to those of skill in the art, various programs and methods for assessing identity are known to those of skill in the art. High levels of identity, such as 90% or 95% identity, readily can be determined without software.

[0157] As used herein, by homologous (with respect to nucleic acid and/or amino acid sequences) means about greater than or equal to 25% sequence homology, typically greater than or equal to 25%, 40%, 60%, 70%, 80%, 85%, 90% or 95% sequence homology; the precise percentage can be specified if necessary. For purposes herein the terms “homology” and “identity” are often used interchangeably, unless otherwise indicated. In general, for determination of the percentage homology or identity, sequences are aligned so that the highest order match is obtained (see, e.g.: Computational Molecular Biology, Lesk, A. M., ed., Oxford University Press, New York, 1988; Biocomputing: Informatics and Genome Projects, Smith, D. W., ed., Academic Press, New York, 1993; Computer Analysis of Sequence Data, Part I, Griffin, A. M., and Griffin, H. G., eds., Humana Press, New Jersey, 1994; Sequence Analysis in Molecular Biology, von Heinje, G., Academic Press, 1987; and Sequence Analysis Primer, Gribskov, M. and Devereux, J., eds., M Stockton Press, New York, 1991; Carillo et al. (1988) SIAM J Applied Math 48:1073). By sequence homology, the number of conserved amino acids is determined by standard alignment algorithms programs, and can be used with default gap penalties established by each supplier. Substantially homologous nucleic acid molecules would hybridize typically at moderate stringency or at high stringency all along the length of the nucleic acid of interest. Also contemplated are nucleic acid molecules that contain degenerate codons in place of codons in the hybridizing nucleic acid molecule.

[0158] Whether any two nucleic acid molecules have nucleotide sequences that are at least 60%, 70%, 80%, 85%, 90%, 95%, 96%, 97%, 98% or 99% “identical” or “homologous” can be determined using known computer algorithms such as the “FAST A” program, using for example, the default parameters as in Pearson et al. (1988) Proc. Natl. Acad. Sci. USA 85:2444 (other programs include the GCG program package (Devereux, J., et al., Nucleic Acids Research 12(I):387 (1984)), BLASTP, BLASTN, FASTA (Atschul, S. F., et al., J Molec Biol 215:403 (1990); Guide to Huge Computers, Martin J. Bishop, ed., Academic Press, San Diego, 1994, and Carillo et al. (1988) SIAM J Applied Math 48:1073). For example, the BLAST function of the National Center for Biotechnology Information database can be used to determine identity. Other commercially or publicly available programs include, DNAStar “MegAlign” program (Madison, Wis.) and the University of Wisconsin Genetics Computer Group (UWG) “Gap” program (Madison Wis.)). Percent homology or identity of proteins and/or nucleic acid molecules can be determined, for example, by comparing sequence information using a GAP computer program (e.g., Needleman et al. (1970) J. Mol. Biol. 48:443, as revised by Smith and Waterman ((1981) Adv. Appl. Math. 2:482). Briefly, the GAP program defines similarity as the number of aligned symbols (i.e., nucleotides or amino acids), which are similar, divided by the total number of symbols in the shorter of the two sequences. Default parameters for the GAP program can include: (1) a unary comparison matrix (containing a value of 1 for identities and 0 for non-identities) and the weighted comparison matrix of Gribskov et al. (1986) Nucl. Acids Res. 14:6745, as described by Schwartz and Dayhoff, eds., ATLAS OF PROTEIN SEQUENCE AND STRUCTURE, National Biomedical Research Foundation, pp. 353-358 (1979); (2) a penalty of 3.0 for each gap and an additional 0.10 penalty for each symbol in each gap; and (3) no penalty for end gaps.

[0159] Therefore, as used herein, the term “identity” or “homology” represents a comparison between a test and a reference polypeptide or polynucleotide. As used herein, the term at least “90% identical to” refers to percent identities from 90 to 99.99 relative to the reference nucleic acid or amino acid sequence of the polypeptide. Identity at a level of 90% or more is indicative of the fact that, assuming for exemplification purposes a test and reference polypeptide length of 100 amino acids are are compared, no more than 10% (i.e., 10 out of 100) of the amino acids in the test polypeptide differs from that of the reference polypeptide. Similar comparisons can be made between test and reference polynucleotides. Such differences can be represented as point mutations randomly distributed over the entire length of a polypeptide or they can be clustered in one or more locations of varying length up to the maximum allowable, e.g. 10/100 amino acid difference (approximately 90% identity). Differences are defined as nucleic acid or amino acid substitutions, insertions or deletions. At the level of homologies or identities above about 85-90%, the result should be independent of the program and gap parameters set; such high levels of identity can be assessed readily, often by manual alignment without relying on software.

[0160] As used herein, an aligned sequence refers to the use of homology (similarity and/or identity) to align corresponding positions in a sequence of nucleotides or amino acids. Typically, two or more sequences that are related by 50% or more identity are aligned. An aligned set of sequences refers to 2 or more sequences that are aligned at corresponding positions and can include aligning sequences derived from RNAs, such as ESTs and other cDNAs, aligned with genomic DNA sequence.

[0161] As used herein, “primer” refers to a nucleic acid molecule that can act as a point of initiation of template-directed DNA synthesis under appropriate conditions (e.g., in the presence of four different nucleoside triphosphates and a polymerization agent, such as DNA polymerase, RNA polymerase or reverse transcriptase) in an appropriate buffer and at a suitable temperature. It will be appreciated that certain nucleic acid molecules can serve as a “probe” and as a “primer.” A primer, however, has a 3′ hydroxyl group for extension. A primer can be used in a variety of methods, including, for example, polymerase chain reaction (PCR), reverse-transcriptase (RT)-PCR, RNA PCR, LCR, multiplex PCR, panhandle PCR, capture PCR, expression PCR, 3′ and 5′ RACE, in situ PCR, ligation-mediated PCR and other amplification protocols.

[0162] As used herein, “primer pair” refers to a set of primers that includes a 5′ (upstream) primer that hybridizes with the 5′ end of a sequence to be amplified (e.g. by PCR) and a 3′ (downstream) primer that hybridizes with the complement of the 3′ end of the sequence to be amplified.

[0163] As used herein, “specifically hybridizes” refers to annealing, by complementary base-pairing, of a nucleic acid molecule (e.g. an oligonucleotide) to a target nucleic acid molecule. Those of skill in the art are familiar with in vitro and in vivo parameters that affect specific hybridization, such as length and composition of the particular molecule. Parameters particularly relevant to in vitro hybridization further include annealing and washing temperature, buffer composition and salt concentration. Exemplary washing conditions for removing non-specifically bound nucleic acid molecules at high stringency are 0.1×SSPE, 0.1% SDS, 65° C., and at medium stringency are 0.2×SSPE, 0.1% SDS, 50° C. Equivalent stringency conditions are known in the art. The skilled person can readily adjust these parameters to achieve specific hybridization of a nucleic acid molecule to a target nucleic acid molecule appropriate for a particular application.

[0164] As used herein, an effective amount is the quantity of a therapeutic agent necessary for preventing, curing, ameliorating, arresting or partially arresting a symptom of a disease or disorder.

[0165] As used herein, unit dose form refers to physically discrete units suitable for human and animal subjects and packaged individually as is known in the art.

### B. Cell Surface Receptor (CSR) Isoforms

[0166] Provided herein are cell surface receptor (CSR) isoforms, families of CSR isoforms and methods of preparing CSR isoforms. The CSR isoforms differ from the cognate receptors in that there are insertions and/or deletions and the resulting CSR isoforms exhibit a difference in one or more activities or functions compared to the cognate receptor. Such changes include a change in a biological activity, such as elimination of kinase activity, and/or elimination of all or part of a transmembrane domain. The CSR isoforms provided herein can be used for modulating the activity of a cell surface receptor. They also can be used as targeting agents for delivery of molecules, such as drugs or toxins or nucleic acids, to targeted cells or tissues.

[0167] CSR isoforms can contain a new domain and/or exhibit a new or different biological function compared to a wildtype and/or predominant form of the receptor. For example, intron-encoded amino acids can introduce a new domain or portion thereof into an isoform. Biological activities that can be altered include, but are not limited to, protein-protein interactions such as dimerization, multimerization and complex formation, specificity and/or affinity for ligand, cellular localization and relocalization, membrane anchoring, enzymatic activity such as kinase activity, response to regulatory molecules including regulatory proteins, cofactors, and other signaling molecules, such as in a signal transduction pathway. Generally, a biological activity is altered in an isoform at least 0.1, 0.5, 1, 2, 3, 4, 5, or 10 fold compared to a wildtype and/or predominant form of the receptor. Typically, a biological activity is altered 10, 20, 50, 100 or 1000 fold or more. For example, an isoform can be reduced in a biological activity.

[0168] CSR isoforms also can modulate an activity of a wildtype and/or predominant form of the receptor. For example, a CSR isoform can interact directly or indirectly with a CSR isoform and modulate a biological activity of the receptor. Biological activities that can be altered include, but are not limited to, protein-protein interactions such as dimerization, multimerization and complex formation, specificity and/or affinity for ligand, cellular localization and relocalization, membrane anchoring, enzymatic activity such as kinase activity, response to regulatory molecules including regulatory proteins, cofactors, and other signaling molecules, such as in a signal transduction pathway.

[0169] A CSR isoform can interact directly or indirectly with a cell surface receptor to cause or participate in a biological effect, such as by modulating a biological activity of the cell surface receptor. A CSR isoform also can interact independently of a cell surface receptor to cause a biological effect, such as by initiating or inhibiting a signal transduction pathway. For example, a CSR isoform can initiate a signal transduction pathway and enhance or promote cell growth. In another example, a CSR isoform can interact with the cell surface receptor as a ligand causing a biological effect for example by inhibiting a signal transduction pathway that can impede or inhibit cell growth. Hence, the isoforms provided herein can function as cell surface receptor ligands in that they interact with the targeted receptor in the same manner that a cognate ligand interacts with and alters receptor activity. The isoforms can bind as a ligand, but not necessarily, to a ligand binding site and serve to block receptor dimerization. They act as ligands in that they interact with the receptor. The CSR isoforms also can act by binding to ligands for the receptor and/or by preventing receptor activities, such as dimerization.

[0170] For example, a CSR isoform can compete with a CSR for ligand binding. A CSR isoform, when it binds to receptor, can be a negative effector ligand, which results in inhibition of receptor function. It also is possible that some CSR isoforms bind a cognate receptor, resulting in activation of the receptor. A CSR isoform can act as a competitive inhibitor of a CSR, for example, by complexing with a CSR isoform and altering the ability of the CSR to multimerize (e.g. dimerize or trimerize) with other CSRs. A CSR isoform can compete with a CSR for interactions with other polypeptides and cofactors in a signal transduction pathway. The cell surface isoforms and families of isoforms provided herein include, but are not limited to, isoforms of receptor tyrosine kinases (also referred to herein as RTK isoforms) and isoforms of other families of CSRs, such as TNFs and other G-protein-coupled receptors. In one example, a CSR isoform is a soluble polypeptide. For example, a CSR isoform lacks at least part or all of a transmembrane domain. Soluble isoforms can and/or modulate a biological activity of a wildtype or predominant form of a receptor (see for example, Kendall et al. (1993) PNAS 90: 10705, Werner et al. (1992) Molec. Cell Biol. 12: 82, Heaney et al. (1995) PNAS 92: 2365, Fukunaga et al. (1990) PNAS 87:8702, Wypych et al. (1995) Blood 85: 66-73, Barron et al. (1994) Gene 147:263, Cheng et al. (1994) Science 263: 1759, Dastot et al. (1996) PNAS 93:10723, Abramovich et al. (1994) FEBS Lett 338:295, Diamant et al. (1997) FEBS Lett 412:379, Ku et al. (1996) Blood 88:4124, Heaney M L and Golde D W (1998), J Leukocyte Biol. 64:135-146).

[0171] A cell surface receptor isoform can be produced by any method known in the art including isolation of isoforms expressed in cells, tissues and organisms, and by recombinant methods and by methods including in silico steps, synthetic methods and any methods known to those of skill in the art. Isoforms of cell surface receptors, including isoforms of receptor tyrosine kinases, can be encoded by alternatively spliced RNA molecules transcribed from a receptor tyrosine kinase gene. Such isoforms include exon deletion, exon extension, exon truncation and intron retention alternatively spliced RNAs. CSR isoforms, include receptor isoforms that contain sequences encoded by introns (or alternative exons); also referred to as intron fusion proteins.

[0172] Pharmaceutical compositions containing one or more different CSR isoforms are provided. Also provided are methods of treatment of diseases and conditions by administering the pharmaceutical compositions or delivering a CSR isoform, such by administering a vector that encodes the isoform. Administration can be effected in vivo or ex vivo.

[0173] Methods of identifying and producing CSR isoforms and nucleic acid molecules encoding CSR isoforms are provided herein. Also provided are methods for expressing, isolating and formulating CSR isoforms.

[0174] Classes of CSR Isoforms

[0175] As noted, CSR isoforms are polypeptides that lack a domain or portion of a domain sufficient to remove or reduce or otherwise alter, including having a positive or negative effect, on biological activity compared to the cognate unbound form of the receptor. Some CSR isoforms also have completely novel functions as a result of the gain or loss of domains, or even single amino acid replacements. CSR isoforms represent splice variants of a gene (or recombinant shortened variants) and can be generated by alternate splicing or by recombinant or synthetic methods. CSR isoforms can be encoded by alternatively spliced RNAs. CSR isoforms also can be generated by recombinant methods and by use of in silico and synthetic methods.

[0176] Typically, a CSR isoform produced from an alternatively spliced RNA is not a predominant form of a polypeptide encoded by a gene. In some instances, a CSR isoform can be a tissue-specific or developmental stage-specific polypeptide or disease specific (i.e., can be expressed at a different level from tissue-to-tissue or stage-to-stage or in a disease state compared to a non-diseased state or only may be expressed in the tissue, at the stage or during the disease process or progress). Alternatively spliced RNA forms that can encode CSR isoforms include, but are not limited to, exon deletion, exon retention, exon extension, exon truncation, and intron retention alternatively spliced RNAs. Included among CSR isoforms are intron fusion proteins.

[0177] (a) Alternative Splicing and Generation of CSR Isoforms

[0178] Genes in eukaryotes include introns and exons that are transcribed by RNA polymerase into RNA products generally referred to as pre-mRNA. Pre-mRNAs are typically intermediate products that are further processed through RNA splicing and processing to generate a final messenger RNA (mRNA). Typically, a final mRNA contains exons sequences and is obtained by splicing out the introns. Boundaries of introns and exons are marked by splice junctions, sequences of nucleotides that are used by the splicing machinery of the cell as signals and substrates for removing introns and joining together exon sequences. Exons are operatively linked together to form a mature RNA molecule. Typically, one or more exons in an mRNA contains an open reading frame encoding a polypeptide. In many cases, an open reading frame can be generated by operatively linking two or more exons; for example, a coding sequence can span exon junctions and an open reading frame is maintained across the junctions.

[0179] RNA also can undergo alternative splicing to produce a variety of different mRNA transcripts from a single gene. Alternatively spliced mRNAs can contain different numbers of and/or arrangements of exons. For example, a gene that has 10 exons can generate a variety of alternatively spliced mRNAs. Some mRNAs can contain all 10 exons, some with only 9, 8, 7, 6, 5 etc. In addition, products, for example, with 9 of the 10 exons, can be among a variety of mRNAs, each with a different exon missing. Alternatively spliced mRNAs can contain additional exons, not typically present in an RNA encoding a predominant or wild type form. Addition and deletion of exons includes addition and deletion, respectively of a 5′ exon, 3′exon and an exon internal in an RNA. Alternatively spliced RNA molecules also include addition of an intron or a portion of an intron operatively linked to or within an RNA. For example, an intron normally removed by splicing in an RNA encoding a wildtype or predominant form can be present in an alternatively spliced RNA. An intron or intron portion can be operatively linked within an RNA, such as between two exons. An intron or intron portion can be operatively linked at one end of an RNA, such as at the 3′ end of a transcript. In some examples, the presence of intron sequence within an RNA terminates transcription based on poly-adenylation sequences within an intron.

[0180] Alternative RNA splicing patterns can vary depending upon the cell and tissue type. Alternative RNA splicing also can be regulated by developmental stage of an organism, cell or tissue type. For example, RNA splicing enzymes and polypeptides that regulate RNA splicing can be present at different concentrations in particular cell and tissue types and at particular stages of development. In some cases, a particular enzyme or regulatory polypeptide can be absent from a particular cell or tissue type or at particular stage of development. These differences can produce different splicing patterns for an RNA within a cell or tissue type or stage, thus giving rise to different populations of mRNAs. Such complexity can generate a number of protein products appropriate for particular cell types or developmental stages.

[0181] Alternatively spliced mRNAs can generate a variety of different polypeptides, also referred to herein as isoforms. Such isoforms can include polypeptides with deletions, additions and shortenings. For example, a portion of an open reading frame normally encoded by an exon can be removed in an alternatively spliced mRNA, thus resulting in a shorter polypeptide. An isoform can have amino acids removed at the N or C terminus or the deletion can be internal. An isoform can be missing a domain or a portion of a domain as a result of a deleted exon. Alternatively spliced mRNAs also can generate polypeptides with additional sequences. For example, a stop codon can be contained in an exon; when this exon is not included in an mRNA, the stop codon is not present and the open reading frame continues into the sequences contained in downstream exons. In such examples, additional open reading frame sequences add additional amino acid residues to a polypeptide and can include addition of a new domain or a portion thereof.

[0182] (b) Intron Fusion Proteins

[0183] One class of isoforms is intron fusion proteins. An intron fusion protein is an isoform that lacks a domain or portion of a domain sufficient to remove or reduce a biological activity of a receptor. In addition, an intron fusion protein contains one or more amino acids not encoded by an exon, operatively linked to exon-encoded amino acids and/or is shortened compared to a wildtype or predominant form encoded by a CSR gene. Typically, an intron fusion protein is shortened by the presence of one or more stop codons in an intron fusion protein-encoding RNA that are not present in the corresponding sequence of an RNA encoding a wildtype or predominant form of a CSR polypeptide. Addition of amino acids and/or a stop codon can result in an intron fusion protein that differs in size and sequence from a wildtype or predominant form of a polypeptide.

[0184] An intron fusion protein is modified in one or more biological activities. For example, addition of amino acids in an intron fusion protein can add, extend or modify a biological activity compared to a wildtype or predominant form of a polypeptide. For example, fusion of an intron encoded amino acid sequence to a protein can result in the addition of a domain with new functionality. Fusion of an intron encoded polypeptide to a protein also can modulate an existing biological activity of a protein, such as by inhibiting a biological activity, for example, inhibition of dimerization or inhibition of kinase activity.

[0185] Intron fusion proteins include natural and combinatorial intron fusion proteins. A natural intron fusion protein is encoded by an alternatively spliced RNA that contains one or more introns or a portion thereof operatively linked to one or more exons of a gene. A natural intron fusion protein contains one or more amino acids encoded by an intron sequence and/or an intron fusion protein can be shortened as a result of one or more stop codons encoded by an intron sequence operatively linked to one or more exons. A combinatorial intron fusion protein is a polypeptide that is shortened compared to a wildtype or predominant form of a polypeptide. Typically, the shortening removes one or more domains or a portion thereof from a polypeptide. Combinatorial intron fusion proteins often mimic a natural intron fusion protein in that one or more domains or a portion thereof is/are deleted as in a natural intron fusion protein derived from the same gene sequence or derived from a gene sequence in a related gene family.

[0186] i. Natural Intron Fusion Proteins

[0187] Natural intron fusion proteins are generated from a class of alternatively spliced mRNAs that includes mRNAs that have incorporated intron sequences into mRNA as well as exon sequences, such as intron retention RNA molecules and some exon extension RNAs. They include all such variants that occur and can be isolated from a cell or tissue, identified in a database or synthesized based upon the sequence and structure of a gene. Any splice variant that is possible and that includes one or more codons (including only a stop codon) from an intron is considered a natural intron fusion protein.

[0188] The incorporated intron sequences can include one or more introns or a portion thereof. Such mRNAs can arise by a mechanism of intron retention. For example, a pre-mRNA is exported from the nucleus to the cytoplasm of the cell before the splicing machinery has removed one or more introns. In some cases, splice sites can be actively blocked, for example by cellular proteins, preventing splicing of one or more introns.

[0189] Retention of one or more introns or a portion thereof also can lead to the generation of isoforms referred to herein as natural intron fusion proteins. For example, an intron sequence can contain an open reading frame that is operatively linked to the exon sequences by RNA splicing. Intron-encoded sequences can add amino acids to a polypeptide, for example, at either the N or C terminus of a polypeptide, or internally within a polypeptide. In some examples, an intron sequence also can contain one or more stop codons. An intron encoded stop codon that is operatively linked with an open reading frame in one or more exons can terminate the encoded polypeptide. Thus, an isoform can be produced that is shortened as a result of the stop codon. In some examples, an intron retained in an mRNA can result in the addition of one or more amino acids and a stop codon to an open reading frame, thereby producing an isoform that terminates with an intron encoded sequence.

[0190] Provided herein are natural intron fusion proteins, that can be generated by intron retention, including intron fusion proteins with addition of domains or portion of domains encoded by an intron and intron fusion proteins with one or more domains or portion of domain deleted. For example, an intron sequence can be operatively linked in place of an exon sequence that is typically within an mRNA for a gene. A domain or portion thereof encoded by the exon is thus deleted from and intron encoded amino acids are included in the encoded polypeptide.

[0191] In another example, an intron sequence is operatively linked in addition to the typically present exons in an mRNA. In one example, an operatively linked intron sequence can introduce a stop codon in-frame with exon sequences encoding a polypeptide. In another example, an operatively linked intron sequence can introduce one or more amino acids into a polypeptide. In some embodiments, a stop codon in-frame also is operatively linked with exon sequences encoding a polypeptide, thereby generating an mRNA encoding a polypeptide with intron-encoded amino acids at the C terminus.

[0192] In one example of a natural intron fusion protein, one or more amino acids encoded by an intron sequence are operatively linked at the C terminus of a polypeptide. For example, an intron fusion protein is generated from a nucleic acid sequence that contains one or more exon sequences at the 5′ end of an RNA followed by one or more intron sequences or a portion of an intron sequence retained at the 3′ end of an RNA. An intron fusion protein produced from such nucleic acid contains exon-encoded amino acids at the N-terminus and one or more amino acids encoded by an intron sequence at the C-terminus. In another example, an intron fusion protein is generated from a nucleic acid by operatively linking a stop codon encoded within an intron sequence to one or more exon sequences, thereby generating a nucleic acid sequence encoding shortened polypeptide.

[0193] ii. Combinatorial Intron Fusion Proteins

[0194] Intron fusion proteins also can be generated by recombinant methods and/or in silico and synthetic methods to produce polypeptides that are modified compared to a wildtype or predominant form of a polypeptide. Typically, combinatorial intron fusion proteins are shortened polypeptides compared to a wildtype or predominant form. Shortening can remove one or more domains or a portion thereof.

[0195] Combinatorial intron fusion proteins are mimics of so-called natural intron fusion proteins in that one or more domains or a portion thereof that are deleted in a natural intron fusion protein derived from the same gene sequence or derived from a gene sequence in a related gene family is/are deleted. For example, as is described further herein, by aligning sequences of gene family members, intron and exons, structures and encoded protein domains can be identified in the nucleic acid. Recombinant nucleic acid molecules encoding polypeptides can be synthesized that contain one or more exons and an intron or portion thereof. Such recombinant molecules can contain one or more amino acids and/or a stop codon encoded by an intron, operatively linked to an exon, producing an intron fusion protein. Recombinant polypeptides also can be produced that contain a combinatorial intron fusion protein. As part of this method, potential immunogenic epitopes can be recognized using motif scanning, and modified with conservative amino acid substitutions or by other modifications well known in the art, such as PEGylation. Generally, any therapeutic intron fusion protein can be modified in this same way to achieve optimized pharmacokinetics or avoid immunogenicity.

[0196] (c) Intron-Encoded Isoforms

[0197] Another CSR isoform is an intron-encoded isoform. An intron-encoded isoform contains an intron sequences or portions thereof from an isoform, such as a natural intron fusion protein. An intron-encoded isoform can interact with a wildtype form or predominant form of a polypeptide produced from the same gene as the intron-encoded isoform. An intron-encoded isoforms can interact with a molecule in a signal transduction pathway that interact with a wildtype form or predominant form of a polypeptide produced from the same gene as the intron-encoded isoform. An intron-encoded isoform can be expressed or produced as a fusion with exon-encoded sequences. An intron-encoded isoform can be expressed or produced as a fusion with heterologous sequences such as a starting methionine. Stop codons can be engineered in the encoding nucleic acid molecule to terminate an intron-encoded isoform within or at the end of the intron sequence.

[0198] (d) Isoforms Generated by Exon Modifications

[0199] CSR isoforms can be generated by modification of an exon relative to a corresponding exon of an RNA encoding a wildtype or predominant form of a CSR polypeptide. Exon modifications include alternatively spliced RNA forms such as exon truncations, exon extensions, exon deletions and exon insertions. These alternatively spliced RNA molecules can encode CSR isoforms which differ from a wildtype or predominant form of a CSR polypeptide by including additional amino acids and/or by lacking amino acid residues present in a wildtype or predominant form of a CSR polypeptide.

[0200] Exon insertions are alternative spliced RNA molecules that contains at least one exon not typically present in an RNA encoding a wildtype or predominant form of a polypeptide. An inserted exon can operatively link additional amino acids encoded by the inserted exon to the other exons present in an RNA. An inserted exon also can contain one or more stop codons such that the RNA encoded polypeptide terminates as a result of such stop codons. If an exon containing such stop codons is inserted upstream of an exon that contains the stop codon used for polypeptide termination of a wildtype or predominant form of a polypeptide, a shortened polypeptide can be produced.

[0201] An inserted exon can maintain an open reading frame, such that when the exon is inserted, the RNA encodes an isoform containing an amino acid sequence of a wildtype or predominant form of a polypeptide with additional amino acids encoded by the inserted exon. An inserted exon can be inserted 5′, 3′ or internally in an RNA, such that additional amino acids encoded by the inserted exon are linked at the N terminus, C-terminus or internally, respectively in an isoform. An inserted exon also can change the reading frame of an RNA in which it is inserted, such that an isoform is produced that contains only a portion of the sequence of amino acids in a wildtype or predominant form of a polypeptide. Such isoforms can additionally contain amino acid sequence encoded by the inserted exon and also can terminate as a result of a stop codon contained in the inserted exon.

[0202] CSR isoforms also can be produced from exon deletion events. An exon deletion refers to an event of alternative RNA splicing that produces a nucleic acid molecule that lacks at least one exon compared to an RNA encoding a wildtype or predominant form of a polypeptide. Deletion of an exon can produce a polypeptide of alternate size such as by removing sequences that encode amino acids as well as by changing the reading frame of an RNA encoding a polypeptide. An exon deletion can remove one or more amino acids from an encoded polypeptide; such amino acids can be N-terminal, C-terminal or internal to a polypeptide depending upon the location of the exon in an RNA sequence. Deletion of an exon in an RNA also can cause a shift in reading frame such that an isoform is produced containing one or more amino acids not present in a wildtype or predominant form of a polypeptide. A shift in reading frame also can result in a stop codon in the reading frame producing an isoform that terminates at a sequence different from that of a wildtype or predominant form of a polypeptide. In one example, a shift of reading frame produces an isoform that is shortened compared to a wildtype or predominant form of a polypeptide. Such shortened isoforms also can contain sequences of amino acids not present in a wildtype or predominant form of a polypeptide.

[0203] CSR isoforms also can be produced by exon extension in an RNA. Exon extension is an event of alternative RNA splicing that produces a nucleic acid molecule that contains at least one exon that is greater in length (number of nucleotides contained in the exon) than the corresponding exon in an RNA encoding a wildtype or predominant form of a polypeptide. Additional sequence contained in an exon extension can encode additional amino acids and/or can contain a stop codon that terminates a polypeptide. An exon insertion containing an in-frame stop codon can produce a shortened isoform, that terminates in the sequence of the exon extension. An exon insertion also can shift the reading frame of an RNA, resulting in an isoform containing one or more amino acids not present in a wildtype or predominant form of a polypeptide and/or an isoform that terminates at a sequence different from that of a wildtype or predominant form of a polypeptide. An exon extension can include sequences contained in an intron of an RNA encoding a wildtype or predominant form of a polypeptide and thereby produce an intron fusion protein.

[0204] CSR isoforms also can be produced by exon truncation. Exon truncations are RNA molecules that contain a shortening of one or more exons such that the one or more exons are shorter in length (number of nucleotides) compared to a corresponding exon in an RNA encoding a wildtype or predominant form of a polypeptide. An RNA molecule with an exon truncation can produce a polypeptide that is shortened compared to a wildtype or predominant form of a polypeptide. An exon truncation also can result in a shift in reading frame such that an isoform is produced containing one or more amino acids not present in a wildtype or predominant form of a polypeptide. A shift in reading frame also can result in a stop codon in the reading frame producing an isoform that terminates at a sequence different from that of a wildtype or predominant form of a polypeptide.

[0205] Alternatively spliced RNA molecules including exon modifications can produce CSR isoforms that a lack a domain or a portion thereof sufficient to reduce or remove a biological activity. For example, exon modified RNA molecules can encode shortened CSR polypeptides that lack a domain or portion thereof. Exon modified RNA molecules also can encode polypeptides where a domain is interrupted by inserted amino acids and/or by a shift in reading frame that interrupts a domain with one or more amino acids not present in a wildtype or predominant form of a polypeptide.

### C. Receptor Tyrosine Kinase Isoforms

[0206] CSR isoforms provided herein include isoforms of receptor tyrosine kinases (RTKs), including receptor tyrosine kinase intron fusion proteins. The receptor tyrosine kinases (RTKs) are a large family of structurally related growth factor receptors. RTKs are involved in cellular processes including cell growth, differentiation, metabolism and cell migration. RTKs also are known to be involved in cell proliferation, differentiation and determination of cell fate. Members of the family include, but are not limited to, epidermal growth factor (EGF) receptors, platelet-derived growth factor (PDGF) receptors, fibroblast growth factor (FGF) receptors, insulin-like growth factor (IGF) receptors, nerve growth factor (NGF) receptors, vascular endothelial growth factor (VEGF) receptors, receptors to ephrin (termed Eph), hepatocyte growth factor (HGF) receptors (termed MET), TEK/Tie-2 (the receptor for angiopoietin-1), discoidin domain receptors (DDR) and others, such as Tyro3/Ax1.

[0207] Provided herein are RTK isoforms that are modified in one more domains of an RTK such that they lack a domain of an RTK or a portion of a domain sufficient to remove or reduce a biological activity of an RTK. Also provided are RTK isoforms modified at one or more amino acids of an RTK sequence such as by shortening and/or addition of one more amino acids. Additional amino acids can add a new domain or a portion thereof. RTK isoforms can be modified in a biological activity including, but not limited to, dimerization, kinase activity, signal transduction, ligand binding, membrane association and membrane localization. RTK isoforms also can modulate a biological activity of an RTK.

[0208] 1. RTK Domains and Biological Activities

[0209] RTKs have a conserved domain structure including an extracellular domain, a membrane-spanning (transmembrane) domain and an intracellular tyrosine kinase domain. The extracellular domain can bind to a ligand, such as a polypeptide growth factor or a cell membrane-associated molecule. Some RTKs have been classified as orphan receptors, having no identified ligand. Some RTKs are classified as constitutive RTKs, active without ligand binding.

[0210] Typically, dimerization of RTKs activates the catalytic tyrosine kinase domain of the receptor and subsequent activities in signal transduction. RTKs can be homodimers or heterodimers. For example, PDGF is a heterodimer composed of α and β subunits. VEGF receptors are homodimers. EGF receptors can be either heterodimers or homodimers. In another example, ErbB3, in the presence of the ligand heregulin, heterodimerizes with other members of the ErbB family (EGFR family) such as ErbB2 and ErbB3. Many RTKs are capable of autophosphorylation when dimerized, such as by transphosphorylation between subunits. Autophosphorylation in the kinase domain maintains the tyrosine kinase domain in an activated state. Autophosphorylation in other regions of the protein can influence interaction of the receptor with other cellular proteins.

[0211] RTKs interact in signal transduction pathways. For example, RTKs, when activated can phosphorylate other signaling molecules. For example, EGFR interacts in signal transduction pathways involved in processes including proliferation, dedifferentiation, apoptosis, cell migration and angiogenesis. EGFR family members can recruit signaling molecules through protein:protein interactions; some interactions involve specific binding of signaling molecules to tyrosine phosphorylated sites on the receptor. For example, the Grb2/Sos complex can bind to phosphotyrosine sites on EGFR, in turn activating the Ras/Raf/MAPK signaling cascade, which influences cell proliferation, migration and differentiation. Other exemplary signaling molecules include other RTKs, G-coupled receptors, integrins, phospholipase C, Ca²⁺/calmodulin-dependent kinases, transcriptional activators, cytokines and other kinases.

[0212] 2. Receptor Tyrosine Kinase Isoforms

[0213] RTK isoforms lack a domain or a portion of a domain of a receptor tyrosine kinase. Thus, an RTK isoforms differs from its cognate RTK in one or more biological activities. In addition, an RTK isoform can modulate a biological activity of an RTK, such as by interacting with an RTK directly or indirectly. Biological activities include, but are not limited to, protein-protein interactions such as dimerization, multimerization and complex formation, specificity and/or affinity for ligand, cellular localization and relocalization, membrane anchoring, enzymatic activity such as kinase activity, response to regulatory molecules including regulatory proteins, cofactors, and other signaling molecules, such as in a signal transduction pathway.

[0214] 3. RTK Isoform Structure and Activity

[0215] In one embodiment, an RTK isoform is modified in a kinase domain. For example, an RTK isoform contains a deletion of a kinase domain or a portion thereof. The deletion need not be a deletion of the entire domain, one or more amino acids can be deleted within the domain. The deletion can be at the N-terminus of the kinase domain, the C-terminus or internally within the domain. In another example, an RTK isoform contains addition of amino acids in a kinase domain. The addition of amino acids can be at the N-terminus of the domain, the C-terminus or anywhere internally within a kinase domain.

[0216] In one aspect of the embodiment, kinase activity of an RTK isoform is altered. For example, kinase activity of an RTK isoform is reduced or eliminated. In one example, substrate specificity of the kinase activity of an RTK isoform is altered. For example, an RTK isoform is capable of autophosphorylation but not phosphorylation of other polypeptides, such as polypeptides in a signal transduction pathway. In another example, an RTK isoform phosphorylates other polypeptides but is not capable of autophosphorylation. Kinase activity of an RTK isoform can be enhanced in activity. Kinase activity of an RTK isoform can be altered in regulation. For example, the kinase activity can be constitutively active or constitutively inactive, for example, unregulated by the addition of ligand, by receptor dimerization, by complexation such as through protein:protein interactions, and/or by autophosphorylation.

[0217] In one embodiment, an RTK isoform is modified in a transmembrane domain. For example, an RTK isoform contains a deletion of a transmembrane domain or a portion thereof. The deletion can be at the N-terminus of a transmembrane domain, the C-terminus or internally within the domain. In another example, an RTK isoform contains addition of amino acids in a transmembrane domain. The addition of amino acids can be at the N-terminus of the domain, the C-terminus or anywhere internally within the transmembrane domain.

[0218] In one aspect of the embodiments, membrane association and/or localization of an RTK isoform is altered. For example, an RTK isoform can be a soluble protein (e.g. not membrane localized), where a wildtype or a predominant form of the RTK is membrane localized. For example, an RTK isoform can be secreted extracellularly or localized in the cytoplasm or internally within a cellular organelle. An RTK isoform can be altered in its membrane localization. For example, an RTK isoform can associate with internal membranes, such as membranes of cellular organelles, but not the cytoplasmic membrane. An RTK isoform can be reduced in its association with a membrane, such that the proportion of membrane associated protein is altered; for example, some of the protein is soluble and some is membrane associated. An RTK isoform also can be altered in the orientation with or within a membrane compared to the orientation of a wildtype or predominant form of an RTK. For example, more or less of the polypeptide can be embedded within the membrane. More or less of the polypeptide can be associated with either side of the cellular membrane. For example, orientation can be altered such that more of the RTK isoform is found in the cytoplasm or extracellularly compared to a wildtype or predominant form of an RTK.

[0219] In one embodiment, an RTK isoform is altered in its dimerization activity. For example, an RTK-isoform homodimerizes (i.e. an RTK isoform: RTK isoform complex) but does not heterodimerize or is reduced in heterodimerization with a wildtype or predominant form of an RTK derived from the same gene. In another example, an RTK-isoform does not homodimerize with itself, or is reduced in homodimerization activity but can heterodimerize with a wildtype or predominant form of an RTK from the same gene or a different gene. In another example, an RTK isoform is reduced in heterodimerization with RTKs from other genes but heterodimerizes with RTKs from the same gene.

[0220] In one embodiment, an RTK isoform is altered in its signal transduction activity. For example, an RTK isoform is altered in its association with other cellular proteins or cofactors in a signal transduction pathway. For example, an RTK isoform is altered in an interaction such as, but not limited to, an interaction with another RTK, a G-coupled receptor, an integrin, phospholipase C, a Ca²⁺/calmodulin-dependent kinase, a transcriptional activator or regulator, a cytokine and another kinase. In another example, an RTK isoform alters signal transduction of an RTK. For example, an RTK isoform interacts with an RTK and alters its activity in signal transduction, such as by inhibiting or by stimulating signal transduction by the RTK.

[0221] In one embodiment, an RTK isoform is altered in two or more biological activities. For example, an RTK isoform is altered in kinase activity and membrane association. In another example, an RTK isoform is altered in kinase activity and dimerization. In yet another example, an RTK isoform is altered in kinase activity, dimerization and membrane association. For example, an RTK isoform is modified in a kinase domain and a transmembrane domain. In another example, insertion of addition of amino acids interrupts the kinase domain and transmembrane domains. In another embodiment, an RTK isoform is modified at a domain junction, or outside the linear sequence of amino acids for a domain and the modification alters a structure, such as the 3-dimensional structure of a domain such as a kinase domain, or a transmembrane domain.

[0222] 4. Modulation of RTKs by RTK Isoforms

[0223] RTK isoforms can modulate or alter a biological activity of an RTK, such as by interacting directly or indirectly with an RTK. Biological activities include, but are not limited to, protein-protein interactions such as dimerization, multimerization and complex formation, specificity and/or affinity for ligand, cellular localization and relocalization, membrane anchoring, enzymatic activity such as kinase activity, response to regulatory molecules including regulatory proteins, cofactors, and other signaling molecules, such as in a signal transduction pathway. In one embodiment, interaction of an RTK isoform with an RTK, inhibits an RTK biological activity. In another embodiment, interaction of an RTK isoform with an RTK, stimulates a biological activity of an RTK.

[0224] For example, an RTK isoform competes with an RTK for ligand binding. An RTK isoform can be employed as a “ligand sponge” to remove free ligand and thereby regulate or modulate the activity of an RTK. In another example, an RTK isoform acts as a negatively acting ligand when heterodimerized or complexed with an RTK, for example, by preventing trans-autophosphorylation. An RTK isoform that lack the protein kinase domain, or a portion thereof sufficient to alter kinase activity, can inhibit activation of an RTK in a trans dominant manner.

[0225] In one embodiment, an RTK isoform acts as a competitive inhibitor of RTK dimerization. For example, an RTK isoform interacts with an RTK and prevents that RTK from homodimerizing or from heterodimerizing. An isoform that inhibits receptor dimerization can modulate downstream signal transduction pathways, such as by complexing with the receptor and inhibiting receptor activation as downstream signaling. An RTK isoform also acts as a competitive inhibitor of an RTK by competing directly with an RTK for interactions with other polypeptides and cofactors in a signal transduction pathway.

### D. TNFR Isoforms

[0226] CSR isoforms provided herein include isoforms of tumor necrosis factor receptors (TNFRs). TNFR isoforms lack a domain or a portion of a domain of a TNFR receptor. Thus, a TNFR isoform differs from its cognate TNFR in one or more biological activities. In addition, a TNFR isoform can modulate a biological activity of a TNFR, such as by interacting with a TNFR directly or indirectly. Biological activities include, but are not limited to, protein-protein interactions such as trimerization, multimerization and complex formation, specificity and/or affinity for ligand, cellular localization and relocalization, membrane anchoring, response to regulatory molecules including regulatory proteins, cofactors, and other signaling molecules, such as in a signal transduction pathway.

[0227] 1. TNFR Domains and Biological Activities

[0228] The TNF ligand and receptor family regulate a variety of signal transduction pathways including those involved in cell differentiation, activation, and viability. TNFRs have a characteristic repeating extracellular cysteine-rich motif and a variable intracellular domain that differs between members of the TNFR family. The TNFR family of receptors includes, but is not limited to, TNFR1, TNFR2, TNFRrp, the low-affinity nerve growth factor receptor, Fas antigen, CD40, CD27, CD30, 4-1BB, OX40, DR3, DR4, DR5, and herpesvirus entry mediator (HVEM). Ligands for TNFRs include TNF-α, lymphotoxin, nerve growth factor, Fas ligand, CD40 ligand, CD27 ligand, CD30 ligand, 4-1BB ligand, OX40 ligand, APO3 ligand, TRAIL and LIGHT. TNFRs include an extracellular domain, including a ligand binding domain, a transmembrane domain and an intracellular domain that participates in signal transduction. These receptors have names. For example, TNFR1 also is referred to as p55 or p60; and TNFR2 also is referred to as p75 or p80. TNFRs are typically trimeric proteins that trimerize at the cell surface. Trimerization is important for biological activity of TNFRs.

[0229] TNFRs have a characteristic extracellular domain with a cysteine-rich motif. The extracellular domain includes a ligand binding domain. Typically, each TNFR member binds a unique ligand. A few receptors such as TNFR1 and TNFR2 and DR4 and DR5 have overlapping ligand specificity. TNFRs also trimerize. Trimerization can be induced by ligand interaction. TNFR ligands also can be trimers. Some TNFRs can be proteolytically processed to produce a secreted form of the receptor. The secreted form also trimerizes and retains certain biological activities such as ligand binding, interaction with the membrane bound form of the receptor, and inhibition of the membrane-bound form of the receptor.

[0230] TNFRs can trigger signal transduction. For example, TNFR1 activates intracellular pathways involved in apoptosis. TNFR1 trimerizes upon binding TNF ligand. Trimerization induces association of the receptor's death domains. Adapter proteins such as TRADD, TRAF-2, FADD and RIP also associate with the receptor. TRAF-2 and RIP associations activate NF-κB and JNK/AP-1 pathways, including a cascade of kinases. FADD association activates a caspase cascade and subsequent apoptosis.

[0231] 2. TNFR Isoform Structure and Activity

[0232] In one embodiment, a TNFR isoform is modified in a transmembrane domain. For example, a TNFR isoform contains a deletion of a transmembrane domain or a portion thereof. The deletion can be at the N-terminus of a transmembrane domain, the C-terminus or internally within the domain. In another example, a TNFR isoform contains addition of amino acids in a transmembrane domain. The addition of amino acids can be at the N-terminus of the domain, the C-terminus or anywhere internally within the transmembrane domain.

[0233] In one aspect of the embodiments, membrane association and/or localization of a TNFR isoform is altered. For example, a TNFR isoform can be a soluble protein (e.g. not membrane localized), where a wildtype or a predominant form of the TNFR is membrane localized. For example, a TNFR isoform can be secreted extracellularly or localized in the cytoplasm or internally within a cellular organelle. A TNFR isoform can be altered in its membrane localization. For example, a TNFR isoform can associate with internal membranes, such as membranes of cellular organelles, but not the cytoplasmic membrane. A TNFR isoform can be reduced in its association with a membrane, such that the proportion of membrane associated protein is altered; for example, some of the protein is soluble and some is membrane associated. A TNFR isoform also can be altered in the orientation with or within a membrane compared to the orientation of a wildtype or predominant form of a TNFR. For example, more or less of the polypeptide can be embedded within the membrane. More or less of the polypeptide can be associated with either side of the cellular membrane. For example, orientation can be altered such that more of a TNFR isoform is found in the cytoplasm or extracellularly compared to a wildtype or predominant form of a TNFR.

[0234] In one embodiment, a TNFR isoform is modified in an intracellular domain. For example, a TNFR isoform contains a deletion of an intracellular domain or a portion thereof. The deletion can be at the N-terminus of an intracellular domain, the C-terminus or internally within the domain. In another example, a TNFR isoform contains addition of amino acids in an intracellular domain. The addition of amino acids can be at the N-terminus of the domain, the C-terminus or anywhere internally within the intracellular domain.

[0235] In one embodiment, an TNFR isoform is altered in its trimerization activity. For example, a TNFR isoform homotrimerizes (i.e. a TNFR isoform: TNFR isoform complex) but does not heterotrimerize or is reduced in heterotrimerization with a wildtype or predominant form of a TNFR derived from the same gene. In another example, a TNFR isoform does not homotrimerize with itself, or is reduced in homotrimerization activity but can heterotrimerize with a wildtype or predominant form of a TNFR from the same gene or a different gene. In one embodiment, a TNFR isoform acts as a competitive inhibitor of TNFR trimerization. For example, a TNFR interacts with a TNFR and prevents that TNFR from trimerizing.

[0236] In one embodiment, an TNFR isoform is altered in its signal transduction activity. For example, a TNFR isoform is altered in its association with other cellular proteins or cofactors in a signal transduction pathway. For example, a TNFR isoform is altered in an interaction such as, but not limited to, an interaction with a ligand and an adapter protein such as TRADD (TNFR-associated death domain), TRAF-2, FADD (Fas-associated death domain) and RIP (receptor interacting protein). In another example, a TNFR isoform alters signal transduction of a TNFR. For example, a TNFR isoform interacts with a TNFR and alters its activity in signal transduction, such as by inhibiting or by stimulating signal transduction by the TNFR.

[0237] In an exemplary embodiment, a TNFR isoform is altered in two or more biological activities. For example, a TNFR isoform is altered in signal transduction and membrane association. In another example, a TNFR isoform is altered in signal transduction and trimerization. In yet another example, a TNFR isoform is altered in kinase activity, trimerization and membrane association. In another embodiment, an TNFR isoform is modified in an intracellular domain and a transmembrane domain. For example, the two domains, or a portion of the domains are deleted. In another example, insertion or addition of amino acids interrupts the intracellular domain and transmembrane domains. In another embodiment, a TNFR isoform is modified at a domain junction, or outside the linear sequence of amino acids for a domain and the modification alters a structure, such as the 3-dimensional structure of a domain such as an intracellular domain, or a transmembrane domain.

[0238] 3. Modulation of TNFRs by TNFR Isoforms

[0239] TNFR isoforms can modulate or alter a biological activity of a TNFR, such as by interacting directly or indirectly with a TNFR. Biological activities include, but are not limited to, protein-protein interactions such as trimerization, multimerization and complex formation, specificity and/or affinity for ligand, cellular localization and relocalization, membrane anchoring, response to regulatory molecules including regulatory proteins, cofactors, and other signaling molecules, such as in a signal transduction pathway. In one embodiment, interaction of a TNFR isoform with a TNFR, inhibits a TNFR biological activity. In another embodiment, interaction of a TNFR isoform with a TNFR, stimulates a biological activity of a TNFR.

[0240] For example, a TNFR isoform competes with a TNFR for ligand binding. A TNFR isoform can be employed as a “ligand sponge” to remove free ligand and thereby regulate or modulate the activity of a TNFR. In another example, a TNFR isoform acts as a negatively acting ligand when trimerized or complexed with a TNFR, for example, by preventing signal transduction and/or by inhibiting interaction with a member of a signal transduction pathway, such as adapter proteins. In one embodiment, a TNFR isoform acts as a competitive inhibitor of TNFR trimerization. For example, a TNFR isoform interacts with a TNFR and prevents that TNFR from trimerizing. An isoform that inhibits receptor trimerization can modulate downstream signal transduction pathways, such as by complexing with the receptor and inhibiting receptor activation as downstream signaling.

### E. Methods for Identifying and Generating CSR Isoforms

[0241] CSR isoforms can be generated by analysis and identification of naturally occurring genes and expression products (RNAs) using cloning methods in combination with bioinformatics methods such as sequence alignments and domain mapping and selections.

[0242] Provided herein are methods herein for identifying and isolating CSR isoforms that utilize cloning of expressed gene sequences and alignment with a gene sequence such as a genomic DNA sequence. For example, one or more isoforms can be isolated by selecting a candidate gene, such as a receptor tyrosine kinase. Expressed sequences, such as cDNA molecules or regions of cDNAs, are isolated. Primers can be designed to amplify a cDNA or a region of a cDNA. In one example, primers are designed which overlap or flank the start codon of the open reading frame of a candidate gene and primers are designed which overlap or flank the stop codon of the open reading frame. Primers can be used in PCR, such as in reverse transcriptase PCR (RT-PCR) with mRNA, to amplify nucleic acid molecules encoding open reading frames. Such nucleic acid molecules can be sequenced to identify those that encode an isoform. In one example, nucleic acid molecules of different sizes (e.g. molecular masses) from a predicted size (such as a size predicted for encoding a wildtype or predominant form) are chosen as candidate isoforms. Such nucleic acid molecules then can be analyzed, such by a method described herein, to further select isoform-encoding molecules having specified properties.

[0243] Computational analysis is performed using the obtained nucleic acid sequences to further select candidate isoforms. For example, cDNA sequences are aligned with a genomic sequence of a selected candidate gene. Such alignments can be performed manually or by using bioinformatics programs such as SIM4, a computer program for analysis of splice variants. Sequences with canonical donor-acceptor splicing sites (e.g. GT-AG) are selected. Molecules can be chosen which represent alternatively spliced products such as exon deletion, exon retention, exon extension and intron retention can be selected.

[0244] Sequence analysis of isolated nucleic acid molecules also can be used to further select isoforms that retain or lack a domain and/or biological function compared to a wildtype or predominant form. For example, isoforms encoded by isolated nucleic acid molecules can be analyzed using bioinformatics programs such as described herein to identify protein domains. Isoforms then can be selected which retain or lack a domain or a portion thereof.

[0245] In one embodiment of the method, isoforms are selected that lack a transmembrane domain or portion thereof sufficient to lack or significantly reduce membrane localization. For example, isoforms are selected that are shortened before a transmembrane domain or that are shortened within a transmembrane domain. Isoforms also can be selected that lack a transmembrane domain or portion thereof and have one or more amino acids operatively linked in place of the missing domain or portion of a domain. Such isoforms can be the result of alternative splicing events such as exon extension, intron retention, exon deletion and exon insertion. In some case, such alternatively spliced RNA molecules alter the reading frame of an RNA and/or operatively link sequences not found in an RNA encoding a wildtype or predominant form. Isoforms also can be selected that lack a kinase domain or portion thereof. Isoforms can be selected that lack a kinase domain or portion thereof and also lack a transmembrane domain or portion thereof. Isoforms also can be selected that lack a multimerization domain, such as a dimerization or trimerization domain, and/or an intracellular domain that interacts with and participates in signal transduction activity.

[0246] For example, nucleic acid molecules encoding candidate RTK isoforms can be further selected for isoforms that lack a kinase domain, a transmembrane domain, an extracellular domain or a portion thereof. Nucleic acid molecules can be selected which encode an RTK isoform and have a biological activity that differs from a wildtype or predominant form of an RTK. In one example, RTK isoforms are selected that lack a transmembrane domain such that the isoforms are not membrane localized and are secreted from a cell. In another example, TNFR isoforms are identified and selected that lack a transmembrane domain, a portion thereof. TNFR isoforms also can be selected that lack an intracellular domain or that lack an intracellular domain and a transmembrane domain.

[0247] Allelic Variants of Isoforms

[0248] Allelic variants of CSR isoform sequences can be generated or identified that differ in one or more amino acids from a particular CSR isoform. Allelic variation occurs among members of a population or species and also between species. For example, isoforms can be derived from different alleles of a gene; each allele can have one or more amino acid differences from the other. Such alleles can have conservative and/or non-conservative amino acid differences. Allelic variants also include isoforms produced or identified from different subjects, such as individual subjects or animal models or other animals. Amino acid changes can result in modulation of an isoform biological activity. In some cases, an amino acid difference can be “silent,” having no or virtually no detectable effect on a biological activity. Allelic variants of isoforms also can be generated by mutagenesis. Such mutagenesis can be random or directed. For example, allelic variant isoforms can be generated that alter amino acid sequences or a potential glycosylation site to effect a change in glycosylation of an isoform, including alternate glycosylation, increased or inhibition of glycosylation at a site in an isoform. Allelic variant isoforms can be at least 90% identical in sequence to an isoform. Generally, an allelic variant isoform from the same species is at least 95%, 96%, 97%, 98%, 99% identical to an isoform, typically an allelic variant is 98%, 99%, 99.5% identical to an isoform.

### F. Exemplary CSR Isoforms

[0249] The methods herein can be used to generate CSR isoforms from a variety of genes. One exemplary group of genes is receptor tyrosine kinases. Receptor tyrosine kinases (RTKs) are a large collection of genes and encoded polypeptides that can be grouped into families based on, for example, structural arrangements of sequence motifs in the polypeptides. For example, structural motifs in the extracellular domains such as, immunoglobulin, fibronectin, cadherin, epidermal growth factor and kringle repeats can be used to group RTKs. Such classification by structural motifs has identified greater then 16 families of RTKs, each with a conserved tyrosine kinase domain. Examples of RTKs include, but are not limited to, erythropoietin-producing hepatocellular (EPH) receptors (also referred to as ephrin receptors), epidermal growth factor (EGF) receptors, fibroblast growth factor (FGF) receptors, platelet-derived growth factor (PDGF) receptors, vascular endothelial growth factor (VEGF) receptors, cell adhesion RTKs (CAKs), Tie/Tek receptors, hepatocyte growth factor (HGF) receptors (termed MET), TEK/Tie-2 (the receptor for angiopoietin-1), discoidin domain receptors (DDR), insulin growth factor (IGF) receptors, insulin receptor-related (IRR) receptors and others, such as Tyro3/Ax1. Exemplary genes encoding RTKs include, but are not limited to, ErbB2, ErbB3, DDR1, DDR2, EGFR, EphA1, EphA2, EphA3, EphA4, EphA5, EphA6, EphA7, EphA8, EphB1, EphB2, EphB3, EphB4, EphB5, EphB6, FGFR-1, FGFR-2, FGFR-3, FGFR-4, FLT1 (also known as VEGFR-1), VEGFR-2, VEGFR-3 (also known as VEGFRC), MET, RON, PDGFR-A, PDGFR-B, CSF1R, Flt3, KIT, TIE-1 and TEK (also known as TIE-2) and genes encoding the RTKs noted above and not set forth.

[0250] RTKs participate in a variety of signal transduction pathways. RTKs regulate critical cellular processes including cell proliferation, dedifferentiation, apoptosis, cell migration and angiogenesis. RTK activation and thus subsequent activation of a signal transduction pathway is generally dependent on receptor activation, such as by activation of the receptor by ligand binding and autophosphorylation. RTKs can be subject to misregulation leading to misregulation of signal transduction. Such misregulation is associated with a number of diseases and conditions. Alternatively, certain RTKs are expressed on cells and lead to or participate in alteration in cellular activities, such as oncogenic transformation. Such expression and/or misregulation is associated with a number of diseases and conditions, including but not limited to diseases involving abnormal cell proliferation, such as neoplastic diseases, restenosis, disease of the anterior eye, cardiovascular diseases, obesity and a variety of others.

[0251] RTK isoforms provided herein and generated by methods provided herein can be used to modulate a biological activity of an RTK, such as an RTK endogenous to a particular cell type or tissue. The ability to modulate a biological activity of an RTK allows re-regulation of misregulated RTKs as well as directed regulation of cellular pathways in which RTKs participate. Modulating a biological activity of an RTK includes direct modulation, whereby an RTK isoform interacts with an RTK, such as by complexation with an RTK, modulation of homodimerization and/or heterodimerization of an RTK and/or modulation of trans-phosphorylation of an RTK, including inhibition of phosphorylation of an RTK. Modulation of an RTK also includes indirect modulation whereby an RTK isoform indirectly affects a biological activity of an RTK. Indirect modulation includes isoforms that act as a “ligand sponge,” competing for ligand binding with an RTK. Indirect modulation also includes interactions of an isoform with signaling molecules in a signaling pathway, thus modulating the activity such as by competition with interactions of such signaling molecules with an RTK. Exemplary RTK isoforms and uses of such RTK isoforms in targeting and regulating RTK activity are described below.

[0252] 1. EGFR

[0253] EGFR (epidermal growth factor receptor) is a 170 kDa protein that binds to EGF, a small, 53 amino acid protein-ligand that stimulates the proliferation of epidermal cells and a variety of other cell types. EGF receptors are widely expressed in epithelial, mesenchymal and neuronal tissues and play important roles in proliferation and differentiation. EGF Receptor is characterized by several functional domains. The EGFR protein (GenBank No. NP_{—}005219 set forth as SEQ ID NO:252 is characterized by two Receptor L Domains between amino acids 57-168 and amino acids 361-481. Receptor L Domains make up the bilobal ligand binding site. A Furin-like cysteine rich region, typically involved in the signal transduction mechanism of receptor tyrosine kinases and receptor aggregation, can be found in EGFR between amino acids 184-338. The transmembrane domain of EGFR lies between amino acids 646-668 and protein kinase domain lies between amino acids 712-968.

[0254] EGFR polypeptides include allelic variants of EGFR. For example, an allelic variant contains one or more amino acid changes compared to SEQ ID NO:252. For example, one or more amino acid variations can occur in the protein kinase domain of EGFR. An allelic variant can include amino acid changes at position 719 where, for example, G is replaced by C, or at position 858 where, for example, L is replaced by R, or at position 861 where, for example, L is replaced by Q. An allelic variation also can include one or more amino acid changes, such as at position 521 (SNP NO: 11543848) where, for example, R can be replaced by K. In one example, an allelic variant includes one or more amino acid changes compared to SEQ ID NO:252 and the variant exhibits a change in biological activity. Amino acid changes occurring in the protein kinase domain, such as at position 719, 858, or 861, can be associated with a response to Gefitinib in patients with non-small-cell lung cancer indicating an essential role of the EGFR signaling pathway in the tumor, or, such as at position 858, can be associated with enhanced activity of the EGFR receptor in response to EGF as assessed by autophosphorylation of EGFR. An exemplary EGFR allelic variant containing one or more amino acid changes described above is set forth as SEQ ID NO: 288.

[0255] EGF receptors are encoded by a family of related genes known as also erbB genes (e.g. ErbB2, ErbB3, ErbB4) and HER genes (e.g. Her-2). The EGF receptor family includes four members, EGF-receptor (HER-1; erbB-1), human epidermal growth factor receptor-2 (HER-2; ErbB2), HER-3 (ErbB3) and HER-4 (ErbB4). The ligand for EGFR/HER-1 is EGF, while the ligand for HER-2, HER-3 and HER-4 is neuregulin-1 (NRG-1). NRG-1 preferentially binds to either HER-3 or HER-4 after which the bound receptor subunit heterodimerizes with HER-2. HER-4 also is capable of homodimerization to form an active receptor.

[0256] Misregulation of the ErbB family has been implicated in a number of different types of cancer. For example, overexpression of EGFR is associated with a number of human tumors including, but not limited to, esophageal, stomach, bladder and colon cancers, gliomas and meningiomas, squamous carcinoma of the lungs, and ovarian, cervical and renal carcinomas. Using the methods provided herein, RTK isoforms and pharmaceutical compositions containing RTK isoforms can be generated for use as therapeutic agents which target and re-regulate misregulation of EGF receptors.

[0257] a. ErbB2

[0258] ErbB2 is a member of the EGF receptor family. The ErbB2 protein (GenBank No. NP_{—}004439 set forth as SEQ ID NO:266) is characterized by two Receptor L Domains between amino acids 52-173 and amino acids 366-486; a Furin-like cysteine rich region between amino acids 189-343; the transmembrane domain between amino acids 653-675; and protein kinase domain between amino acids 720-976. A ligand that binds with high affinity has not been identified for ErbB2. Instead, ErbB3 or ErbB4 when bound by ligand (NRG-1) heterodimerize with ErbB2 to form an active receptor dimer. In addition, ErbB2 exhibits constitutive activity (homodimerization and kinase activity) in the absence of ligand. In addition, overexpression of ErbB2 is capable of cell transformation. ErbB2 overexpression has been identified in a variety of cancers, including breast, ovarian, gastric and endometrial carcinomas. Thus, targeting ErbB2 homodimers can regulate ErbB2 homodimerization. For example, an ErbB2 RTK isoform can target and down-regulate ErbB2 overexpression. Additionally, an ErbB2 RTK-isoform can target ErbB3 and/or ErbB4 through heterodimerization.

[0259] ErbB2 proteins include allelic variants of ErbB2. In one example, an allelic variant contains one or more amino acid changes compared to SEQ ID NO:266. For example, one or more amino acid variations can occur in the transmembrane domain of ErbB2. An allelic variant can include amino acid changes at position 655 where, for example, I is replaced by V. In one example, an allelic variant includes one or more amino acid changes compared to SEQ ID NO:266 and the variant exhibits a change in a biological activity. Amino acid changes occurring in the transmembrane domain of ErbB2, such as at position 655, can be associated with increased risk of prostate cancer, gastric cancer, or breast cancer. An exemplary ErbB2 allelic variant containing one or more amino acid changes described above is set forth as SEQ ID NO: 299.

[0260] Provided herein are exemplary ErbB2 isoforms that lack one or more domains or a part thereof compared to a cognate ErbB2 such as set forth in SEQ ID NO:266. Included are exemplary ErbB2 isoforms that lack a transmembrane domain and lack a kinase domain, such as the polypeptides set forth in SEQ ID NOS: 96-98 and 108. Such isoforms can contain other domains of ErbB2. For example, the exemplary ErbB2 isoform set forth as SEQ ID NO: 96 is characterized by two Receptor L Domains between amino acids 54-175 and amino acids 368-488, and a Furin-like cysteine rich region between amino acids 191-345. The exemplary ErbB2 isoform set forth as SEQ ID NOS: 97 and 98 are characterized by two Receptor L Domains between amino acids 52-173 and amino acids 366-486, and a furin-like cysteine rich region between amino acids 189-343. The exemplary ErbB2 isoform set forth as SEQ ID NO: 108 is characterized by a portion of a Receptor L Domain between amino acids 52-75.

[0261] ErbB2 isoforms can be used to modulate RTKs such as in the treatment of cancers characterized by the overexpression of EGFR receptors such as those characterized by overexpression of ErbB2 and/or ErbB3. ErbB-2 isoforms can be used as a treatment for autoimmune diseases which involve EGFR family members in the maintenance of inflammation and hyperproliferation, including asthma. ErbB2 isoforms also can be used to target RTKs in conditions including Menetrier's disease, Alzheimer's disease and as modulators, for example as an antagonist for bone resorption.

[0262] b. ErbB3

[0263] ErbB3 also is a member of the EGF receptor family involved in regulating development of neuronal survival and synaptogenesis, astrocytic differentiation and microglial activation. The ErbB3 protein (GenBank No. NP_{—}001973 set forth as SEQ ID NO:267) is characterized by two Receptor L Domains between amino acids 55-167 and between amino acids 353-474; a Furin-like cysteine rich region between amino acids 180-332; transmembrane domain between amino acids 644-666; and protein kinase domain between amino acids 709-965. The ligand for ErbB3 is NRG-1. Although NRG-1 can bind to ErbB3 and ErbB4, ErbB3 binds NRG-1 with an affinity an order of magnitude lower than ErbB4. ErbB3 has lower tyrosine kinase activity compared to other members of the EGFR family. It is capable of recruiting alternative signaling molecules, for example, phosphatidylinositol-3 kinase. ErbB3 overexpression has been implicated in a number of human cancers such as breast, lung and bladder cancers and adenocarcinomas.

[0264] ErbB3 isoforms can be used to target RTKs such as in the treatment of cancers characterized by the overexpression of EGFR receptors such as those characterized by overexpression of ErbB2 and/or ErbB3. ErbB3 isoforms can target ErbB3 homodimers. ErbB3 isoforms can target ErbB2 through heterodimerization of an ErbB3 isoform with ErbB2. ErbB3 isoforms can be used for treatment of diseases and conditions in which EGFR receptors are involved. For example, ErbB3 isoforms can be used as a treatment for autoimmune diseases which involve EGFR family members in the maintenance of inflammation and hyperproliferation, including asthma. ErbB3 isoforms also can be used to target RTKs in conditions including Menetrier's disease, Alzheimer's disease and as modulators, for example as an antagonist for bone resorption.

[0265] 2. Discoidin Domain Receptors—DDR1

[0266] Discoidin domain receptors (e.g. DDR1) are a family of RTKs that are thought to play a role in cell adhesion. The DDR1 protein (GenBank No. NP_{—}054699 set forth as SEQ ID NO: 250) is characterized by a F5/8 type C domain, also known as the discoidin (DS) domain, between amino acids 46-182; the transmembrane domain between amino acids 417-439; and protein kinase domain between amino acids 610-913. The discoidin domain is a unique structural motif in the extracellular domain that is homologous to the Dictyostelium discoideum (slime mold) protein discoidin-1, a carbohydrate-binding protein involved in cell aggregation. The discoidin-like domain, although not found in other RTKs, is found in other extracellular molecules that are known to interact with cellular membrane proteins (e.g., coagulation factors V and VIII).

[0267] DDR1 proteins include allelic variants of DDR1. In one example, an allelic variant contains one or more amino acid changes compared to SEQ ID NO:250. For example, one or more amino acid variations can occur in the F5/8 type C or discoidin domain of DDR1. An allelic variant can include amino acid changes at position 53 where, for example, W can be replaced by A, or at position 55 where, for example, D can be replaced by A, or at position 66 where, for example, S can be replaced by A, or at position 68 where, for example, D can be replaced by A, or at position 105 where, for example, R can be replaced by A, or at position 106 where, for example, H can be replaced by A, or at position 110 where, for example, L can be replaced by A, or at position 112 where, for example, K can be replaced by A, or at position 173 where, for example, V can be replaced by A, or at position 174 where, for example, M can be replaced by A, or at position 175 where, for example, S can be replaced by A. In one example, an allelic variant includes one or more amino acid changes compared to SEQ ID NO:250 and the variant exhibits a change in a biological activity. Amino acid changes occurring in the discoidin domain of DDR1, such as those at position 105 and 175, can result in reduced activation and phosphorylation of DDR1 due to an inability to bind to collagen. Other amino acid changes in the discoidin domain of DDR1, such as those at positions 106, 173, and 174, can result in a marked reduction in the ability of DDR1 to bind to collagen. An exemplary DDR1 allelic variant containing one or more amino acid changes described above is set forth as SEQ ID NO: 286.

[0268] DDRs are widely expressed in fetal and adult organs and tissues. DDR1 is expressed primarily in epithelial cells in brain, lung, kidney and gastrointestinal tract, whereas DDR2 is expressed in brain, heart, and muscle. DDR also may play an important role in brain development. DDR tyrosine kinases have been linked to human cancers. For example, DDR1 can bind to collagen (e.g. types I through VI) and mediate collagen-induced activation of matrix metalloproteinase-1. Matrix metalloproteinase-1 is involved in the degradation of extracellular matrix, which allows neoplastic cells to metastasize. Overexpression of DDR1 has been linked to cancers such as breast, ovarian and esophageal cancers and a variety of central nervous system neoplasms, such as pediatric brain cancers. Activation of DDR1 also has been implicated in inflammatory responses.

[0269] Exemplary DDR isoforms include DDR1 isoforms set forth in SEQ ID NO: 106, 115 and 117. These exemplary DDR1 isoforms lack one or more domains or a part thereof compared to a cognate DDR1 such as set forth in SEQ ID NO:250. The exemplary DDR1 isoforms set forth as SEQ ID NOS: 106, 115, and 117 contain an F5/8 type C domain between amino acids 46-182, and lack the transmembrane and protein kinase domains.

[0270] DDR1 isoforms, including DDR1 isoforms herein, can include allelic variation in the DDR1 polypeptide. For example, a DDR1 isoform can include one or more amino acid differences present in an allelic variant. In one example, a DDR1 isoform includes one or more allelic variation as set forth in SEQ ID NO:286. Examples of allelic variation include variants in the F5/8 type C and discoidin domains, including, but not limited to amino acid variation at positions corresponding to amino acids 53, 55, 66, 68, 105, 106, 110, 113, 173, 174, or 175 of SEQ ID NO:286.

[0271] DDR1 isoforms can be used to modulate DDR1 RTK. For example, a DDR1 isoform can be used to down regulate DDR1 overexpression and or activation in diseases and conditions in which DDR1 is involved.

[0272] 3. Eph Receptors

[0273] Eph receptors (erythropoietin-producing hepatocellular receptors; also referred to as ephrin receptors) are the largest known family of RTKs. The ligands for Eph receptors are ephrins (Eph receptor interacting protein). The Eph and Ephrin system includes at least fourteen Eph receptor tyrosine kinase proteins and nine ephrin membrane ligands. The Eph receptors and Ephrin membrane proteins play important roles in disease and development (see, e.g., FIG. 1). For example, binding of cell surface Eph and ephrin proteins results in bi-directional signals that regulate the cytoskeletal, adhesive and motile properties of the interacting cells. Through these signals Eph and Ephrin proteins are involved in early embryonic cell movements, which establish the germ layers, and in cell movements involved in formation of tissue boundaries and the pathfinding of axons. Ligand and receptor are membrane-bound molecules and signaling can occur through either protein. The ephrins have been separated into two classes based on the manner in which they are anchored to the cell membrane; type A ligands are linked to the cell membrane by a glycosylpho-phatidylinositol (GPI) linkage and type B ligands encode for a transmembrane domain. Eph receptors include, but are not limited to, EphA1, EphA2, EphA3, EphA4, EphA5, EphA6, EphA7, EphA8, EphB1, EphB2, EphB3, EphB4, EphB5, EphB6.

[0274] Ephrin receptors are characterized by a cytoplasmic tyrosine kinase domain, a conserved cysteine-rich domain, two fibronectin type III domains and an immunoglobulin-like N-terminal ligand binding domain. Further, two tyrosine residues near the transmembrane domain are highly conserved and phosphorylated in response to ligand binding and appear to be critical for enzymatic function. Other sites of protein-protein interaction also are mediated by sterile alpha motifs and postsynaptic density protein, disc large, zona occludens binding motifs located near the C-terminal end of some Eph receptors. Sterile alpha motifs (SAM) mediate cell-cell initiated signal transduction via the binding of SH2-containing proteins to a conserved tyrosine that is phosphorylated and in many cases mediates homodimerization.

[0275] The Eph family of RTKs is involved in a variety of cellular processes, including embryonic patterning, neuronal targeting, vascular development and angiogenesis. Particularly due to a role in angiogenesis, Eph receptors have been implicated in human cancers, such as breast cancer. Misregulation of EphA receptors also are involved in pathological conditions. For example, upregulation of the EphA receptor tyrosine kinase stimulates vascular endothelial cell growth factor (VEGF)-induced angiogenesis, common in certain eye diseases, rheumatoid arthritis and cancer. An EphA isoform, such as an isoform acting as an EphA receptor antagonist can be used to block or inhibit inappropriate angiogenesis. EphB receptors have been implicated in cancers such as colorectal cancers. EphB receptors also play a role in dendritic spine development (post-synaptic targets for excitatory synapses) and may be implicated in neurodegenerative disorders. Exemplary EphA and EphB isoforms are set forth in SEQ ID NOS: 107, 149, 151, 153, 155, 168, 170, 172, and 174.

[0276] a. EphA1

[0277] EphA1 is a type A Eph receptor. The EphA1 protein (GenBank No. NP_{—}005223 set forth as SEQ ID NO:253) is characterized by an Ephrin ligand binding domain between amino acids 27-204, two fibronectin type III domains between amino acids 333-431 and between amino acids 448-528; a transmembrane domain between amino acids 548-570; protein kinase domain between amino acids 624-880, and two SAM domains (SAM-1 between amino acids 911-975, and SAM-2 between amino acids 910-976) at the carboxy terminus.

[0278] EphA1 proteins include allelic variants of EphA1. In one example, an allelic variant contains one or more amino acid changes compared to SEQ ID NO:253, such as the allelic variations set forth in SEQ ID NO:289. One or more amino acid variations can occur, for example, in the ephrin ligand binding domain of EphA1, such as an amino acid change at position 160 where, for example, A can be replaced by V.

[0279] Type A Eph receptors bind to type A ephrins, which are linked to cell membranes via a GPI anchor. EphA1 is expressed widely in differentiated epithelial cells, including skin, adult thymus, kidney and adrenal cortex. Overexpression of EphA1 has been implicated in a variety of human cancers, including head and neck cancer. EphA1 isoforms can be used to target such diseases and other conditions in which Eph receptors have been implicated.

[0280] Exemplary EphA1 isoforms include EphA1 isoforms set forth in SEQ ID NOS: 107, 149, 151, and 153. These exemplary EphA1 isoforms lack one or more domains or a part thereof compared to a cognate EphA1 such as set forth in SEQ ID NO:253. The exemplary EphA1 isoforms set forth as SEQ ID NOS:149 and 153 contain an ephrin ligand binding domain between amino acids 27-204 and one of two fibronectin type III domains between amino acids 333-431. The isoform set forth as SEQ ID NO: 149 lacks a fibronectin type III domain, a transmembrane domain, protein kinase domain, and two SAM domains compared to the cognate receptor. The exemplary EphA1 isoform set forth as SEQ ID NO: 151 contains the ephrin ligand binding domain between amino acids 27-204, but does not contain fibronectin type III domains, transmembrane domain, protein kinase domain and SAM domains. The exemplary EphA1 isoform set forth as SEQ ID NO: 107 contains the ephrin ligand binding domain between amino acids 1-114, but does not contain fibronectin type III domains, transmembrane domain, protein kinase domain and SAM domains.

[0281] EphA1 isoforms, including EphA1 isoforms herein, can include allelic variation in the EphA1 polypeptide. For example, an EphA1 isoform can include one or more amino acid differences present in an allelic variant. In one example, an EphA1 isoform includes one or more allelic variations as set forth in SEQ ID NO:289. An allelic variation can include one or more amino acid changes in the ephrin ligand binding domain, such as at position 160.

[0282] b. EphA2

[0283] EphA2 binds ephrin-A3, ephrin-A1, ephrin-A4, an ephrin-A2. EphA2 expression is frequently elevated in cancer and is highly expressed in tumor tissues including breast, prostate, non-small cell lung cancers, colon, kidney, lung, ovary, stomach, uterus, and aggressive melanomas. EphA2 has also been found in Schwann cells, the primitive streak and hindbrain in restricted expression pattern. It has been suggested that EphA2 does not simply function as a marker, but as an active participant in malignant progression. The normal cellular functions of EphA2 are not well understood, but tumor-based models suggests potential roles for EphA2 in the regulation of cell growth, survival, migration, and angiogenesis.

[0284] The EphA2 receptor set forth as SEQ ID NO:254 (GenBank No. NP_{—}004422) is characterized by an ephrin ligand binding domain between amino acids 28-201, two fibronectin type III domains between amino acids 329-424 and between amino acids 436-519, a transmembrane domain between amino acids 536-558, protein kinase domain between amino acids 613-871; and two SAM domains (SAM-1 between amino acids 902-966, and SAM-2 between amino acids 901-968) at the carboxy terminus.

[0285] EphA2 proteins include allelic variants of EphA2. In one example, an allelic variant contains one or more amino acid changes compared to positions corresponding to the amino acid sequence set forth as SEQ ID NO:254. For example, one or more amino acid variations can occur in the ephrin ligand binding domain of EphA2. An allelic variant can include amino acid changes at position 94 (SNP NO: 1058370) where, for example, I can be replaced by N, or at position 96 (SNP NO: 1058371) where, for example, I can be replaced by F, or at position 99 (SNP NO: 1058372) where, for example, K can be replaced by N. Additional examples of allelic variation can occur in the fibronectin type III domain. An allelic variant can include amino acid changes at position 350 (SNP NO: 11543934) where, for example, P is replaced by T. One or more amino acid variations also can occur in the protein kinase domain. An allelic variant can include amino acid changes at position 825 where, for example, E can be replaced by K. An exemplary EphA2 allelic variant containing one or more amino acid changes described above is set forth as SEQ ID NO: 290.

[0286] Exemplary EphA2 isoforms lack one or more domains or a part thereof compared to a cognate EphA2 such as set forth in SEQ ID NO:254. The exemplary EphA2 isoform set forth as SEQ ID NO: 168 contains an ephrin ligand binding domain between amino acids 28-201, a fibronectin type III domain between amino acids 329-424 and a portion of another fibronectin type III domain between amino acids 436-497. SEQ ID NO: 168 does not contain the transmembrane, protein kinase, and SAM domains. EphA2 isoforms, including EphA2 isoforms herein, can include allelic variation in the EphA2 polypeptide. For example, an EphA2 isoform can include one or more amino acid difference present in an allelic variant. In one example, an EphA2 isoform includes one or more allelic variations as set forth in SEQ ID NO:290. An allelic variation can include a position corresponding to amino acid positions 94, 96, or 99 in SEQ ID NO:254, or for example, in the fibronectin type III domain, such as at a position corresponding to amino acid 350 in SEQ ID NO:254.

[0287] C. EphA8

[0288] EphA8 is a type A Eph receptor. Type A Eph receptors bind to type A ephrins, which are linked to cell membranes via a GPI anchor. EphA8 has been implicated in cell migration and cell adhesion as well as nervous system development, including axon guidance. EphA8 isoforms can be used to target such diseases and other conditions in which Eph receptors have been implicated.

[0289] The EphA8 receptor (GenBank No. NP_{—}065387 set forth as SEQ ID NO:260) is characterized by an Ephrin ligand binding domain between amino acids 31-204, two fibronectin type III domains between amino acids 329-425 and amino acids 437-524, a transmembrane domain between amino acids 541-563, protein kinase domain between 635-892 and two SAM domains (SAM-1 between amino acids 931-992 and SAM-2 between amino acids 927-994).

[0290] EphA8 proteins include allelic variants of EphA8. In one example, an allelic variant contains one or more amino acid changes compared to positions corresponding to the amino acid sequence set forth as SEQ ID NO:260. For example, one or more amino acid variations can occur in the fibronectin type III domain of EphA8. An allelic variant can include amino acid changes at position 444 (SNP NO: 2295021) where, for example, V can be replaced by M. Allelic variations also can occur at position 301 (SNP NO: 638524) where, for example, A can be replaced by V, or at position 612 (SNP NO:999765) where, for example, E can be replaced by Q. An exemplary EphA8 allelic variant containing one or more amino acid changes described above is set forth as SEQ ID NO: 293.

[0291] d. EphB1

[0292] EphB1 has been shown to bind to ephrin-B2, ephrin-B1, ephrin-A3, ephrin-A1 and ephrin-B3. EphB1 is expressed in developing and adult neural tissue. EphB1 signaling pathways impact responses relevant to vascular development, including cell attachment, migration and capillary-like assembly responses.

[0293] The EphB1 protein (GenBank No. NP_{—}004432 set forth as SEQ ID NO:261) is characterized by an Ephrin ligand binding domain between amino acids 19-196, two fibronectin type III domains between amino acids 323-414 and between amino acids 434-518, transmembrane domain between amino acids 541-563, protein kinase domain between amino acids 619-878, and two SAM domains (SAM-1 between amino acids 909-973, and SAM-2 between amino acids 908-975) at the carboxy terminus.

[0294] EphB1 proteins include allelic variants of EphB1. In one example, an allelic variant contains one or more amino acid changes compared to positions corresponding to the amino acid sequence set forth as SEQ ID NO:261. For example, one or more amino acid variations can occur in the ephrin ligand binding domain of EphB1. An allelic variant can include amino acid changes at position 87 (SNP NO:1042794) where, for example, T can be replaced by S, or at position 152 (SNP NO: 1042793 where, for example, G can be replaced by R. Additional examples of amino acid changes can occur in the fibronectin type III domain. An allelic variant can include amino acid changes at position 367 (SNP NO: 1042789) where, for example, R is replaced by G, or at position 485 (SNP NO: 1042788) where, for example, R is replaced by S. One or more amino acid changes also can occur in the protein kinase domain. An allelic variant can include amino acid changes at position 813 (SNP NO:1042786) where, for example, V can be replaced by I, or at position 847 (SNP NO:1042785) where, for example, M can be replaced by T. Another example of amino acid changes can occur in the SAM domain. An allelic variant can include amino acid changes at position 973 (SNP NO:1042784) where, for example, R is replaced by W. Allelic variations also can occur at position 274 (SNP NO: 1126906) where, for example, T is replaced by R. An exemplary EphB1 allelic variant containing one or more amino acid changes described above is set forth as SEQ ID NO: 294.

[0295] Exemplary EphB1 isoforms lack one or more domains or a part thereof compared to a cognate EphB1 such as set forth in SEQ ID NO:261. The exemplary EphB1 isoform set forth as SEQ ID NO: 155 contains a portion of an ephrin ligand binding domain between amino acids 19-167 and lacks fibronectin type III domains, transmembrane domain, protein kinase domain, and SAM domains compared with a cognate EphB1 receptor (e.g. SEQ ID NO:261).

[0296] EphB1 isoforms, including EphB1 isoforms herein, can include allelic variation in the EphB1 polypeptide. For example an EphB1 isoform can include one or more amino acid differences present in an allelic variant. In one example, an EphB1 isoform includes one or more allelic variation as set forth in SEQ ID NO:294. An allelic variation can include one or more amino acid changes in the ephrin ligand binding domain, such as positions corresponding to amino acid positions 87 and 152 of SEQ ID NO:261.

[0297] e. EphB4

[0298] EphB4 receptors bind to ephrin-B2 and ephrin-B1 proteins. Ephrin-B proteins transduce signals, such that bidirectional signaling can occur upon interaction with Eph receptor.

[0299] The EphB4 receptor polypeptide (GenBank No. NP_{—}004435 set forth as SEQ ID NO:264) is characterized by an ephrin ligand binding domain between amino acids 17-197, two fibronectin type III domains between amino acids 324-414 and between amino acids 434-519, transmembrane domain between amino acids 541-563, cytoplasmic protein kinase domain between 615-874, and two SAM domains (SAM-1 between amino acids 905-969, and SAM-2 between amino acids 904-971) at the carboxy terminus.

[0300] EphB4 proteins can include allelic variants of EphB4. In one example, an allelic variant contains one or more amino acid changes compared to SEQ ID NO:264. For example, one or more amino acid variations can occur in the fibronectin type III domain of EphB4. An allelic variant can include amino acid changes at position 463 (SNP NO:7457245) where, for example, A can be replaced by D, or at position 471 (SNP NO:3891495) where, for example, Y can be replaced by D. Additional amino acid changes can occur in the SAM domain. An allelic variant can include amino acid changes at position 926 (SNP NO: 1056997) where, for example, E can be replaced by D. An exemplary EphB4 allelic variant containing one or more amino acid changes described above is set forth as SEQ ID NO: 297.

[0301] Exemplary EphB4 isoforms include the EphB4 isoforms set forth in SEQ ID NO: 170, 172 and 174. These exemplary EphB4 isoforms lack one or more domains or a part thereof compared to a cognate EphB4 such as set forth in SEQ ID NO:264. The exemplary EphB4 isoform set forth as SEQ ID NO: 170 contains an ephrin ligand binding domain between amino acids 17-197. SEQ ID NO: 170 does not contain fibronectin type III domains, transmembrane domain, protein kinase domain, and SAM domains. The exemplary EphB4 isoform set forth as SEQ ID NO: 172 contains an ephrin ligand binding domain between amino acids 17-197, a fibronectin type III domain between amino acids 324-414 and a portion of another fibronectin type III domain between amino acids 434-514. SEQ ID NO: 172 does not contain the transmembrane domain, protein kinase domain, and SAM domains. The exemplary EphB4 isoform set forth as SEQ ID NO: 174 contains an ephrin ligand binding domain between amino acids 17-197 and a portion of a fibronectin type III domain between amino acids 324-413. SEQ ID NO: 174 does not contain the second fibronectin type III domain, transmembrane domain, protein kinase domain, and SAM domains.

[0302] EphB4 isoforms, including EphB4 isoforms herein, can include allelic variation in the EphB4 polypeptide. For example an EphB4 isoform can include one or more amino acid differences present in an allelic variant. In one example, an EphB4 isoform includes one or more allelic variation as set forth in SEQ ID NO:297. An allelic variation can include one or more amino acid changes in the fibronectin type III domain, such as at positions corresponding to amino acid positions 463 or 471 of SEQ ID NO:264.

[0303] 4. Fibroblast Growth Factor Receptors

[0304] The fibroblast growth factor receptor (FGFR) family includes FGFR-1, FGFR-2, FGFR-3, FGFR-4 and FGFR-5. There are at least 23 known FGF proteins that are capable of binding to one or more FGF receptors. FGF receptors are structurally characterized by three N-terminal Ig-like domains (extracellular), a transmembrane domain and the split tyrosine-kinase domain at the C-terminus (cytoplasmic). FGFs and their receptors are involved in stimulation of cellular proliferation, promoting angiogenesis and wound healing, and modulating cell motility and differentiation. FGFRs have been implicated in a variety of human cancers as well as diseases of the eye.

[0305] a. FGFR-1

[0306] FGFR-1 has specificity for FGF-1, -2, and -4 and is expressed in a number of cell types including fibroblasts, endothelial cells, certain epithelial cells, vascular smooth muscle cells, lymphocytes, macrophages, and numerous tumor cells.

[0307] The FGFR-1 polypeptide (GenBank No. AAA35835 set forth as SEQ ID NO:268) is characterized by three immunoglobulin-like domains; domain 1 between amino acids 35-119, domain 2 between amino acids 156-246, and domain 3 between amino acids 253-357. FGFR-1 also has a transmembrane domain between amino acids 375-397 and protein kinase domain between amino acids 476-752.

[0308] FGFR-1 proteins include allelic variants of FGFR-1. In one example, an allelic variant contains one or more amino acid changes compared to positions corresponding to the amino acid sequence set forth as SEQ ID NO:268. For example, one or more amino acid variations can occur in the immunoglobulin domain of FGFR-1. An allelic variant can include amino acid changes at position 97 where, for example, G can be replaced by D, or at position 99 where, for example, Y can be replaced by C, or at position 165 where, for example, A can be replaced by S, or at position 190 where, for example, K can be replaced by E, or at position 192 where, for example, S can be replaced by G, or at position 198 where, for example, D can be replaced by G, or at position 275 where, for example, C can be replaced by Y. Additional amino acid changes can occur in the protein kinase domain. An allelic variant can include amino acid changes at position 605 where, for example, V can be replaced by M, or at position 664 where, for example, W can be replaced by R, or at position 717 where, for example, M can be replaced by R. One or more amino acid change also can occur at position 22 where, for example, R can be replaced by S, or at position 250 where, for example P can be replaced by R, or at position 770 where, for example, P can be replaced by S, or at position 816 where, for example G can be replaced by R, or at position 820 where, for example, R can be replaced by C. In one example, an allelic variant includes one or more amino acid change compared to SEQ ID NO:268 and the variant exhibits a change in a biological activity. Polypeptides containing amino acid changes in either the immunoglobulin or protein kinase domain of FGFR-1, such as those at positions 97, 99, 165, 275, 605, 664, or 717, can be characterized as loss-of function mutations. In the context of a cognate receptor (such as SEQ ID NO: 268) such changes cause autosomal dominant Kallmann syndrome. Amino acid changes occurring in the protein kinase domain, such as at position 717, can impair PLC gamma association with the receptor and inhibit FGF-mediated phosphotidylinositol and Ca2+ mobilization; these changes, however, do not affect FGF-mediated mitogenesis. Additional allelic variants, such at position 250, can be associated with autosomal dominant skeletal disorders such as Pfeiffer syndrome. An exemplary FGFR-1 allelic variant containing one or more amino acid changes described above is set forth as SEQ ID NO:300.

[0309] Exemplary FGFR-1 isoforms include FGFR-1 isoforms set forth in SEQ ID NOS: 119 and 176. These exemplary FGFR-1 isoforms lack one or more domains or a part thereof compared to a cognate FGFR-1 such as set forth in SEQ ID NO:268. The exemplary FGFR-1 isoform set forth as SEQ ID NO: 119 contains immunoglobulin-like domain 2 between amino acids 67-157 and a portion of immunoglobulin-like domain 3 between amino acids 164-220. The exemplary FGFR-1 isoform set forth as SEQ ID NO: 176 contains immunoglobulin-like domain 2 between amino acids 70-159 and immunoglobulin-like domain 3 between amino acids 166-268. These exemplary isoforms each lack the transmembrane and protein kinase domains compared to a cognate FGFR-1 polypeptide (e.g. SEQ ID NO:268).

[0310] FGFR-1 isoforms, including FGFR-1 isoforms herein, can include allelic variation in the FGFR-1 polypeptide. For example, a FGFR-1 isoform can include one or more amino acid differences present in an allelic variant. In one example, a FGFR-1 isoform includes one or more allelic variation as set forth in SEQ ID NO:300. An allelic variant can include one or more amino acid change in the immunoglobulin domain, such as at positions corresponding to amino acid positions 97, 99, 165, 190, 192, and 198 of SEQ ID NO:268. An additional allelic variant can include one or more amino acid changes at a position corresponding to amino acid position 22 of SEQ ID NO:268.

[0311] b. FGFR-2

[0312] FGFR-2 is a member of the fibroblast growth factor receptor family. Ligands to FGFR-2 include a number of FGF proteins, such as, but not limited to, FGF-1 (basic FGF), FGF-2 (acidic FGF), FGF-4 and FGF-7. FGF receptors are involved in cell-cell communication of tissue remodeling during development as well as cellular homeostasis in adult tissues. Overexpression of, or mutations in, FGFR-2 have been associated with hyperproliferative diseases, including a variety of human cancers, including breast, pancreatic, colorectal, bladder and cervical malignancies. FGFR-2 isoforms such as FGFR-2 intron fusion proteins can be used to treat conditions in which FGFR-2 is upregulated, including cancers.

[0313] The FGFR-2 protein (GenBank No. NP_{—}000132 set forth as SEQ ID NO:269) is characterized by three immunoglobulin-like domains; domain 1 between amino acids 41-125, domain 2 between amino acids 159-249, and domain 3 between amino acids 256-360. FGFR-2 also contains a transmembrane domain between amino acids 378-400 and protein kinase domain between amino acids 481-757.

[0314] FGFR-2 proteins include allelic variants of FGFR-2. In one example, an allelic variant contains one or more amino acid changes compared to SEQ ID NO:269. For example, one or more amino acid variations can occur in the immunoglobulin domain of FGFR-2. An allelic variant can include amino acid changes at position 105 where, for example Y can be replaced by C, or at position 162 where, for example, M can be replaced by T, or at position 172 where, for example, A can be replaced by F, or at position 186 (SNP NO: 755793) where, for example, M can be replaced by T, or at position 267 where, for example, S can be replaced by P, or at position 276 where, for example, F can be replaced by V, or at position 278 where, for example, C can be replaced by F, or at position 281 where, for example, Y can be replaced by C, or at position 289 where, for example, Q can be replaced by P, or at position 290 where, for example, W can be replaced by C, or at position 315 where, for example, A can be replaced by S, or at position 338 where, for example, G can be replaced by R, or at position 340 where, for example, Y can be replaced by H, or at position 341 where, for example, T can be replaced by P, or at position 342 where, for example, C can be replaced by R, Y, S, F, or W, or at position 344 where, for example, A can be replaced by P or G, or at position 347 where, for example, S can be replaced by C, or at position 351 where, for example, S can be replaced by C, or at position 354 where, for example, S can be replaced by C. Further examples of amino acid changes can occur in the transmembrane domain. An allelic variant can include amino acid changes at position 384 where, for example, G can be replaced by R. Additional amino acid changes also can occur in the protein kinase domain. An allelic variant can include amino acid changes at position 549 where, for example, N can be replaced by H, or at position 565 where, for example, E can be replaced by G, or at position 641 where, for example, K can be replaced by R, or at position 659 where, for example, K can be replaced by N, or at position 663 where, for example, G can be replaced by E, or at position 678 where, for example, R can be replaced by G. Allelic variations also can occur at position 6 where, for example, R can be replaced by P, or at position 31 where, for example, T can be replaced by I, or at position 152 where, for example, R can be replaced by G, or at position 252 where, for example, S can be replaced by W or L, or at position 253 where, for example, P can be replaced by S or R, or at position 372 where, for example, S can be replaced by C, or at position 375 where, for example, Y can be replaced by C. In one example, an allelic variant includes one or more amino acid change compared to SEQ ID NO:269 and the variant exhibits a change in a biological activity. Amino acid changes occurring in the immunoglobulin domain, such as at positions 105, 172, 267, 276, 278, 281, 289, 290, 315, 338, 340, 341, 342, 344, 347, 351, 354, or the protein kinase domain, such as at positions 549, 565, 641, 659, 663, or 678, or other amino acid changes, such as at positions 252, 253, or 375, are associated with syndromic craniosynostosis including Apert, Crouzon, or Pfeiffer syndromes when such amino acid changes are present in a cognate FGFR-2 such as set forth in SEQ ID NO: 269. An exemplary FGFR-2 allelic variant containing one or more amino acid changes described above is set forth as SEQ ID NO: 301.

[0315] Exemplary FGFR-2 isoforms include FGFR-2 isoforms set forth in SEQ ID NOS: 178, 180, 182 and 184. These exemplary FGFR-2 isoforms lack one or more domains or a part thereof compared to a cognate FGFR-2 such as set forth in SEQ ID NO:269. The exemplary FGFR-2 isoform set forth as SEQ ID NO: 184 contains three immunoglobulin-like domains; domain 1 between amino acids 41-125, domain 2 between amino acids 159-249 and domain 3 between amino acids 256-360, but lacks transmembrane and protein kinase domains. The exemplary FGFR-2 isoform set forth as SEQ ID NO: 180 contains the immunoglobulin-like domains 1, 2 and a portion of domain 3 (between amino acids 41-125, 159-249 and 256-313, respectively), but is missing transmembrane and protein kinase domains. The exemplary FGFR-2 isoform set forth as SEQ ID NO: 178 contains immunoglobulin-like domain 1 between amino acids 41-125 and domain 2 between amino acids 159-249, but lacks immunoglobulin-like domain 3, and transmembrane and protein kinase domains. The exemplary FGFR-2 isoform set forth as SEQ ID NO: 182 contains immunoglobulin-like domains 2 between amino acids 44-134 and domain 3 between amino acids 141-245, but does not contain an immunoglobulin-like domain 1, a transmembrane domain and protein kinase domain.

[0316] FGFR-2 isoforms, including FGFR-2 isoforms herein, can include allelic variation in the FGFR-2 polypeptide. For example, a FGFR-2 isoform can include one or more amino acid differences present in an allelic variant. In one example, a FGFR-2 isoform includes one or more allelic variation as set forth in SEQ ID NO:301. An allelic variation can include one or more amino acid changes in the immunoglobulin domain, such as at positions 105, 162, 172, 186, 267, 276, 278, 281, 289, 290, 315, 338, 340, 341, 342, 344, 347, 351, or 354. Additional allelic variations can include one or more amino acid changes, such as at positions 6, 31, 152, 252, or 253.

[0317] C. FGFR-4

[0318] FGFR-4 is a member of the FGF receptor tyrosine kinase family. FGFR-4 regulation is modified in some cancer cells. For example, in some adenocarcinomas FGFR-4 is down-regulated compared with expression in normal fibroblast cells. Alternate forms of FGFR-4, are expressed in some tumor cells. For example, ptd-FGFR-4 lacks a portion of the FGFR-4 extracellular domain but contains the third Ig-like domain, a transmembrane domain and a kinase domain. This isoform is found in pituitary gland tumors and is tumorigenic. FGFR-4 isoforms can be used to treat diseases and conditions in which FGFR4 is misregulated. For example, an FGFR-4 isoform can be used to down regulate tumorigenic FGFR-4 isoforms such as ptd-FGFR-4.

[0319] The FGFR-4 protein (GenBank No. NP_{—}002002 set forth as SEQ ID NO: 271) is characterized by three immunoglobulin-like domains; domain 1 between amino acids 35-113, domain 2 between amino acids 152-242, and domain 3 between amino acids 249-351. FGFR-4 also contains a transmembrane domain between amino acids 370-386 and protein kinase domain between amino acids 467-743.

[0320] FGFR-4 proteins include allelic variants of FGFR-4. In one example, an allelic variant contains one or more amino acid changes compared to SEQ ID NO:271. For example, one or more amino acid variations can occur in the immunoglobulin domain of FGFR-4. An allelic variant can include amino acid changes at position 275 (SNP NO: 11954456) where, for example, S is replaced by R, or at position 297 (SNP NO:1057633) where, for example, D is replaced by V. Additional amino acid changes can occur in the protein kinase domain. An allelic variant can include an amino acid change at position 616 (SNP NO:2301344) where, for example, R can be replaced by L. Allelic variations also can occur at position 10 (SNP NO: 1966265) where, for example, V can be replaced by I, or at position 136 (SNP NO: 376618) where, for example, P can be replaced by L, or at position 388 (SNP NO: 351855) where, for example, G can be replaced by R. An exemplary FGFR-4 allelic variant containing one or more amino acid changes described above is set forth as SEQ ID NO: 303.

[0321] Exemplary FGFR-4 isoforms lack one or more domains or a part thereof compared to a cognate FGFR-4 such as set forth in SEQ ID NO:271. Exemplary FGFR-4 isoforms include FGFR-4-isoforms set forth in SEQ ID NOS: 91, 109 and 121. The exemplary FGFR-4 isoform set forth as SEQ ID NO: 121 contains immunoglobulin-like domain 1 between amino acids 35-113, domain 2 between amino acids 152-242, and domain 3 between amino acids 249-351, but lacks a transmembrane and protein kinase domains. The exemplary FGFR-4 isoform set forth as SEQ ID NO: 109 contains immunoglobulin-like domain 2 between amino acids 62-154 and a portion of domain 3 between amino acids 161-209, but does not contain an immunoglobulin-like domain 1, a transmembrane and protein kinase domains. The exemplary FGFR-4 isoform set forth as SEQ ID NO: 91 lacks the immunoglobulin-like domains, the transmembrane domain and the protein kinase domain present in the cognate receptor (e.g. SEQ ID NO:271).

[0322] FGFR-4 isoforms, including FGFR-4 isoforms herein, can include allelic variation in the FGFR-4 polypeptide. For example, a FGFR-4 isoform can include one or more amino acid differences present in an allelic variant. In one example, a FGFR-4 isoform includes one or more allelic variation as set forth in SEQ ID NO:303. An allelic variation can include one or more amino acid changes in the immunoglobulin domain, such as at amino acids corresponding to positions 275 or 297 of SEQ ID NO:271. Additional allelic variants can include one or more amino acid changes, such as at amino acids corresponding to amino acid positions 10 or 136 of SEQ ID NO:271.

[0323] 5. Platelet-Derived Growth Factor Receptors

[0324] Platelet-derived growth factor receptors (PDGFRs) are homo or heterodimers that contain two subunits, α and β. Receptor subunits are comprised of five Ig-like domains at the N-terminus, a transmembrane domain, and a split kinase domain at the C-terminus.

[0325] The PDGFR-A protein (GenBank No. NP_{—}006197 set forth as SEQ ID NO: 275) is characterized by three immunoglobulin-like domains; domain 1 between amino acids 42-102, domain 2 between amino acids 228-292, and domain 3 between amino acids 319-412. PDGFR-A also contains a transmembrane domain between amino acids 527-549 and protein kinase domain between amino acids 593-953. The PDGFR-B protein (GenBank No. NP_{—}002600 set forth as SEQ ID NO: 276) is characterized by two immunoglobulin-like domains between amino acids 32-119 and amino acids 213-311, a transmembrane domain between amino acids 534-556, and protein kinase domain between amino acids 600-958.

[0326] PDGF receptors can include allelic variation, for example, PDGFR-B and PDGFR-A allelic variants. In one example, an allelic variant contains one or more amino acid changes compared to SEQ ID NOS:275 or 276. For example, with respect to PDGFR-B, allelic variations can include one or more amino acid change at position 29 (SNP NO:17110944) where, for example, I is replaced by F, or at position 194 (SNP NO:2229560) where, for example, I is replaced by T, or at position 345 (SNP NO:2229558) where, for example, P is replaced by S. An exemplary PDGFR-B allelic variant containing one or more amino acid changes described above is set forth as SEQ ID NO: 307.

[0327] PDGF receptors and ligands are involved in a variety of cellular processes, including clot formation, extracellular matrix synthesis, chemotaxis of immune cells apoptosis and embryonic development. Overexpression of PDGF receptors has been linked to a number of human carcinomas, including stomach, pancreas, lung and prostate. Activation of the platelet derived growth factor receptor (PDGFR) is associated with benign prostatic hypertrophy and prostate cancer as well as other cancer types. Activation of PDGFR also is associated with smooth muscle proliferation in development of atherosclerosis. PDGFR also has been implicated in modulating proliferative vitreoretinopathy, a common medical problem caused by the proliferation of fibroblastic cells behind the retina, resulting in retinal detachment. Similar to its receptor, PDGF ligand is a homo or heterodimer of A and/or B chains. The α-PDGF receptor can be activated by either PDGF-A or PDGF-B. A β-PDGF receptor only can be activated by the PDGF-B chain. Two additional members of the PDGF family also have been isolated, PDGF-C and PDGF-D.

[0328] Exemplary PDGFR isoforms include the isoforms set forth in SEQ ID NO:111 and 147. These exemplary PDGFR isoforms lack one or more domains or a part thereof compared to a cognate PDGFR such as set forth in SEQ ID NO:276. The exemplary PDGFR-A isoform set forth as SEQ ID NO: 111 is characterized by one immunoglobulin-like domains between amino acids 41-102, but does not contain a transmembrane domain or protein kinase domain. The exemplary PDGFR-B isoform set forth as SEQ ID NO: 147 is characterized by two immunoglobulin-like domains between amino acids 32-119 and amino acids 213-310, but does not contain transmembrane domain or protein kinase domain.

[0329] PDGFR isoforms, including PDGFR isoforms herein, can include allelic variation in the PDGFR polypeptide. For example, a PDGFR isoform can include one or more amino acid differences present in an allelic variant. In one example, a PDGFR isoform includes one or more allelic variation as set forth in SEQ ID NO:307. An allelic variation can include one or more amino acid changes, such as at amino acids corresponding to positions 29 or 194 of SEQ ID NO:276.

[0330] PDGFR isoforms can be used to target diseases and conditions in which PDGFR is involved, including hyperproliferative diseases, such as proliferative vitreoretinopathy and smooth muscle hyperproliferative conditions including atherosclerosis.

[0331] Flt3 (fins-related tyrosine kinase 3), CSF1R (colony stimulating factor 1 receptor) and KIT (receptor for c-kit) also are members of the PDGFR RTK subfamily. The CSF1R protein (GenBank No. NP_{—}005202 set forth as SEQ ID NO: 249) is characterized by three immunoglobulin-like domains; domain 1 between amino acids 19-102, domain 2 between amino acids 202-324, and domain 3 between amino acids 412-487. CSF1R also is characterized by a transmembrane domain between amino acids 515-537 and protein kinase domain between amino acids 582-910. CSF1R proteins include allelic variants of CSF1R. In one example, an allelic variant contains one or more amino acid changes compared to a cognate CFS1R receptor such as set forth in SEQ ID NO:249. For example, one or more amino acid variations can occur in the immunoglobulin-like domain 2 of CSF1R. An allelic variant can include one or more amino acid changes as position 279 (SNP NO: 3829986) where, for example, V can be replaced by M. Allelic variants also can include amino acid changes at position 362 (SNP NO:10079250) where, for example, H can be replaced by R, or position 969 (SNP NO: 1801271 where, for example, Y can be replaced by C. An exemplary CSF1R allelic variant containing one or more amino acid changes described above is set forth as SEQ ID NO: 285.

[0332] The exemplary CSF1R isoform set forth as SEQ ID NO: 145 contains an immunoglobulin-like domain 1 between amino acids 19-102, a partial immunoglobulin-like domain 2 between amino acids 202-296. SEQ ID NO: 145 does not contain Ig-like domain 3, a transmembrane or protein kinase domain. CSF1R isoforms, including CSF1R isoforms herein, can include allelic variation in the CSF1R polypeptide. For example, a CSF1R isoform can include one or more amino acid differences present in an allelic variant. In one example, a CSF1R isoform includes one or more allelic variation as set forth in SEQ ID NO:285. An allelic variation can include one or more amino acid changes in the immunoglobulin-like domain 2, such as at positions 279. Allelic variations also can include one or more amino acid changes, such as at position 362.

[0333] The KIT receptor (GenBank No. NP_{—}000213 set forth as SEQ ID NO:273) is characterized by an immunoglobulin-like domain between amino acids 210-336, a transmembrane domain between amino acids 521-543, and protein kinase domain between amino acids 589-924. KIT receptor include allelic variants of KIT. In one example, an allelic variant contains one or more amino acid changes compared to SEQ ID NO:273, such as set forth in SEQ ID NO:305. For example, one or more amino acid variations can occur in the transmembrane domain of KIT. An allelic variant can include one or more amino acid changes at position 541 (SNP NO: 3822214) where, for example, M can be replaced by L or V. Additional examples of amino acid changes can occur in the protein kinase domain. An allelic variant can include one or more amino acid changes at position 664 where, for example, G can be replaced by R, or at position 788 where, for example, C can be replaced by R, or at position 801 where, for example, T can be replaced by I, or at position 816 where, for example, D can be replaced by V, H, or Y, or at position 820 where, for example, D is replaced by V, or at position 822 where, for example, N can be replaced by K or Y, or at position 823 where, for example, Y can be replaced by D or C, or at position 835 where, for example, W can be replaced by R, or at position 869 where, for example, P can be replaced by S, or at position 900 where, for example, Y can be replaced by F. Allelic variants also can include one or more amino acid change at position 52, where, for example, D is replaced by N, or at position 136 where, for example, C is replaced by R, or at position 178 where, for example, A is replaced by T, or at position 557 where, for example, W is replaced by R.

[0334] In one example, an allelic variant includes one or more amino acid changes compared to SEQ ID NO:273 and the variant exhibits a change in a biological activity. For example, an allelic variant contains one or more amino acid changes occurring in the protein kinase domain of KIT, such as at positions 816, 823, 822, or 801. In another example, one or more amino acid changes occur in the protein kinase domain, such as at position 900, and are associated with diminished receptor phosphorylation, association with adaptor proteins such as CrkII, and activation. In the context of a wildtype or predominant form of the receptor such allelic variation can be associated with a disease or condition, for example, testicular seminomas, intracranial germinomas, chronic myelogenous leukemia, human peibaldism and idiopathic myelofibrosis.

[0335] The exemplary KIT isoform set forth as SEQ ID NO: 93 contains an immunoglobulin-like domain between amino acids 210-336, but does not contain a transmembrane domain or protein kinase domain. KIT isoforms, including KIT isoforms herein, can include allelic variation in the KIT polypeptide. For example, a KIT isoform can include one or more amino acid differences present in an allelic variant. In one example, a KIT isoform includes one or more allelic variations as set forth in SEQ ID NO:305. An allelic variation can include one or more amino acid changes, such as at amino acids corresponding to positions 136 or 178 of SEQ ID NO:273.

[0336] The Flt3 receptor (GenBank No. NP_{—}004110 set forth as SEQ ID NO:272) is characterized by an immunoglobulin-like domain between amino acids 78-161 and between amino acids 257-345, a transmembrane domain between amino acids 542-564, and a tyrosine kinase domain between amino acids 610-943. Flt3 proteins include allelic variants of Flt3. In one example, an allelic variant contains one or more amino acid changes compared to SEQ ID NO:272, such as those set forth in SEQ ID NO:304. For example, one or more amino acid variations can occur in the tyrosine kinase domain of Flt3. An allelic variant can include amino acid changes at position 835 where, for example, D can be replaced by Y, H, or F, or at position 836 where, for example, I can be replaced by S, or at position 841 where, for example, N can be replaced by I or Y, or at position 842 where, for example Y can be replaced by H. In one example, an allelic variant includes one or more amino acid changes compared to SEQ ID NO:272 and the variant exhibits a change in a biological activity. One or more amino acid changes occurring in the tyrosine kinase domain of Flt3 receptor, such as at positions 835 or 841, can result in the constitutive activation of downstream targets of Flt3, such as signal transducer and activator of transcription STAT5, in the absence of Flt3 ligand stimulation. One or more amino acid changes can be present in the tyrosine kinase domain of Flt3, such as at positions 835, 836, and 842, also can be associated with a disease or condition, for example the progression from myelodysplastic syndrome to acute myeloid leukemia in infants and adults.

[0337] Flt3 is expressed in placenta and various adult tissues such as gonads, brain and in hematopoietic cells. Flt3 is associated with biological regulation in gonads, brain and nervous systems. Flt3 has been implicated as a target for pediatric cancers such as pediatric AML. KIT is involved in regulation in a broad variety of cell types including erythroid cells, interstitial cells, mast cells and germ cells. KIT is associated with a variety of cancers including gastrointestinal stromal tumors. RTK isoforms of Flt3, CSF1R and KIT can be used in the treatment of diseases and conditions in which the RTK are involved.

[0338] 6. MET (Receptor for Hepatocye Growth Factor)

[0339] MET is a RTK for hepatocyte growth factor (HGF), a multifunctional cytokine controlling cell growth, morphogenesis and motility. HGF, a paracrine factor produced primarily by mesenchymal cells, induces mitogenic and morphogenic changes, including rapid membrane ruffling, formation of microspikes, and increased cellular motility. Signaling through MET can increase tumorigenicity, induce cell motility and enhance invasiveness in vitro and metastasis in vivo. MET signaling also can increase the production of protease and urokinase, leading to extracellular matrix/basal membrane degradation, which are important for promoting tumor metastasis.

[0340] MET is a RTK that is highly expressed in hepatocytes. MET is comprised of two disulfide-linked subunit, a 50-kD α subunit and a 145-kD β subunit. In the fully processed MET protein, the α subunit is extracellular, and the β subunit has extracellular, transmembrane, and tyrosine kinase domains. The ligand for MET is hepatocyte growth factor (HGF). Signaling through FGF and MET stimulates mitogenic activity in hepatocytes and epithelial cells, including cell growth, motility and invasion. As with other RTKs, these properties link MET to oncogenic activities. In addition to a role in cancer, MET also has been shown to be a critical factor in the development of malaria infection. Activation of MET is required to make hepatocytes susceptible to infection by malaria, thus MET is a prime target for prevention of the disease.

[0341] The MET receptor (GenBank No. NP_{—}000236 set forth as SEQ ID NO:274) is characterized by a Sema domain between amino acids 55-500. In addition to hepatocyte growth factor receptor, the Sema domain occurs in semaphorins, which are a large family of secreted and transmembrane proteins, some of which function as repellent signals during axon guidance. In MET, the Sema domain has been shown to be involved in receptor dimerization in addition to ligand binding. The MET protein also is characterized by a plexin cysteine rich repeat between amino acids 519-562, three IPT/TIG domains between amino acids 563-655, amino acids 657-739 and amino acids 742-836. IPT stands for Immunoglobulin-like fold shared by Plexins and Transcription factors. TIG stands for the Immunoglobulin-like domain in transcription factors (Transcription factor IG). TIG domains in MET likely play a role in mediating some of the interactions between extracellular matrix and receptor signaling. The MET protein also is characterized by a transmembrane domain between amino acids 951-973 and cytoplasmic protein kinase domain between amino acids 1078-1337.

[0342] MET receptors include allelic variants of MET. In one example, an allelic variant contains one or more amino acid changes compared to SEQ ID NO:274. For example, one or more amino acid variations can occur in the Sema domain of MET. An allelic variant can include amino acid changes at position 113 where, for example, K is replaced by R, or at position 114 where, for example, D is replaced by N, or at position 145 where, for example, V is replaced by A, or at position 148 where, for example, H is replaced by R, or at position 151 where, for example, T is replaced by P, or at position 158 where, for example, V is replaced by A, or at position 168 where, for example, E is replaced by D, or at position 193 where, for example, I is replaced by T, or at position 216 where, for example, V is replaced by L, or at position 237 where, for example, V is replaced by A, or at position 276 where, for example, T is replaced by A, or at position 314 where, for example, F is replaced by L, or at position 337 where, for example, L is replaced by P, or at position 340 where, for example, D is replaced by V, or at position 382 where, for example, N is replaced by D, or at position 400 where, for example, R is replaced by G, or at position 476 where, for example, H is replaced by R, or at position 481 where, for example, L is replaced by M, or at position 500 where, for example, D is replaced by G. In a further example, one or more amino acid variation can occur in the plexin cysteine rich repeat domain of MET. An allelic variant can include amino acid changes at position 542 where, for example, H can be replaced by Y. In other examples, one or more amino acid variation can occur in the IPT/TIG domains of MET. An allelic variant can include amino acid changes at position 622 where, for example, L is replaced by S, or at position 720 where, for example, F is replaced by S, or at position 729 where, for example, A is replaced by T. In an additional example, one or more amino acid variations can occur in the protein kinase domain of MET. An allelic variant can include amino acid changes at position 1094 where, for example, H is replaced by R or at position 1100 where, for example, N is replaced by Y or at position 1230 where, for example, Y is replaced by C, or at position 1235 where, for example, Y is replaced with D, or at position 1250 where, for example, M is replaced by T. Allelic variants also can include one or more amino acid changes, such as at position 37 where, for example, V is replaced by A, or at position 39 where, for example M is replaced by T, or at position 42 where, for example, Q is replaced by R, or at position 501 where, for example, Y can be replaced by H, or at position 511 where, for example, T can be replaced by A. In one example, an allelic variant includes one or more amino acid changes compared to SEQ ID NO:274 and the variant exhibits a change in a biological activity. An exemplary MET allelic variant containing one or more amino acid changes described above is set forth as SEQ ID NO: 306. Amino acid changes occurring in the tyrosine kinase domain of MET receptor, such as those described above, can be associated with dysregulated function of MET. For example, in the context of a wildtype or predominant form of the receptor, allelic changes in MET receptor are implicated in the development of human cancer including the promotion of tumor invasion, angiogenesis, and metastasis.

[0343] Exemplary isoforms of MET provided herein lack one or more domains or a part thereof compared to a cognate MET receptor such as set forth in SEQ ID NO:274. Exemplary MET receptor isoforms provided herein (e.g. SEQ ID NOS: 103, 186, 188, 190, 192, 194, 196, 198, 200, 202, 204, 206, 208, 210, 212, and 214) lack a transmembrane domain and/or a protein kinase domain. In addition, exemplary MET isoforms provided herein contain one or more domains of a wildtype or predominant form of MET receptor (e.g. set forth as SEQ ID NO:274). For example, MET receptor isoforms set forth as SEQ ID NOS: 103, 190, 192, 196, 198, 200, 202, 204, 206, 208, 210, 212, and 214 all contain complete Sema domains. MET isoforms set forth as SEQ ID NOS: 103, 192, 196, 198, 200, 202, 206, 208, 210, 212, and 214 contain complete plexin cysteine rich repeat domains. Met receptor isoforms can include one or more IPT/TIG domains. For example, MET receptor isoforms set forth as SEQ ID NOS: 103, 198, 200, 202, 204, 206, 208, 210, 212, and 214 contain at least one complete IPT/TIG domain. MET receptor isoforms set forth as SEQ ID NOS: 103, 208, 210, 212, and 214 all contain at least two complete IPT/TIG domains. MET receptor isoforms set forth as SEQ ID NOS: 103 and 212 contain three complete IPT/TIG domains. Among the MET receptor isoforms provided herein are isoforms that contain a portion of a domain compared to a wildtype or predominant form of MET receptor (e.g. set forth as SEQ ID NO:274). For example, MET receptor isoforms set forth as SEQ ID NOS: 186, 188, and 194 contain portions of the Sema domain between amino acids 55-412, 55-468, and 55-400, respectively. The MET receptor isoform set forth as SEQ ID NO: 196 contains a portion of an IPT/TIG domain between amino acids 563-621. MET receptor isoforms set forth as SEQ ID NOS: 198, 200 and 204, in addition to the one full IPT/TIG domain, contain a portion of a second IPT/TIG domain (between amino acids 657-664, 657-719, and 629-672, respectively). The MET receptor isoform set forth as SEQ ID NO: 210, in addition to the two full IPT/TIG domains, contains a portion of a third IPT/TIG domain between amino acids 742-823.

[0344] MET isoforms, including MET isoforms herein, can include allelic variation in the MET polypeptide. For example, a MET isoform can include one or more amino acid differences present in an allelic variant. In one example, a MET isoform includes one or more allelic variations as set forth in SEQ ID NO:306. An allelic variation can include one or more amino acid change in the Sema domain, such as at positions 113, 114, 145, 148, 151, 158, 168, 193, 216, 237, 276, 314, 337, 340, 382, 400, 476, 481, or 500. Allelic variations also can occur in the plexin cysteine rich repeat domain, such as at position 542. Further allelic variations also can occur in the IPT/TIG domain, such as at positions 622, 720, or 729. Allelic variations also can include other amino acid changes, such as at positions 37, 39, 42, 501, or 511.

[0345] MET isoforms can be used in treating or preventing metastatic cancer, and in inhibiting angiogenesis, such as angiogenesis necessary for tumor growth. Therapeutic applications of MET isoforms include lung cancer, malignant peripheral nerve sheath tumors (MPNST), colon cancer, gastric cancer, and cutaneous malignant melanoma.

[0346] MET isoforms also can be used in combination with other anti-angiogenesis drugs to prevent tumor cell invasiveness. Anti-angiogenesis drugs produce a state of hypoxia in tumors which can promote tumor cell invasion by sensitizing cells to HGF stimulation. MET isoforms can target and modulate biological activity of MET, such as by inhibiting or down-regulating MET when, anti-angiogenesis drugs are given, thus preventing or inhibiting tumor cell invasiveness.

[0347] Therapeutic applications of MET isoforms also include prevention of malaria. Plasmodium, the causative agent of malaria, must first infect hepatocytes to initiate a mammalian infection. Sporozoites migrate through several hepatocytes, by breaching their plasma membranes, before infection is finally established in one of them. Wounding of hepatocytes by sporozoite migration induces the secretion of hepatocyte growth factor (HGF), which renders hepatocytes susceptible to infection. Infection depends on activation of the HGF receptor, MET, by secreted HGF. The malaria parasite exploits MET as a mediator of signals that make the host cell susceptible to infection. HGF/MET signaling induces rearrangements of the host-cell actin cytoskeleton that are required for the early development of the parasites within hepatocytes. MET-isoforms can be administered as a therapeutic to down-regulate MET, thus inhibiting or preventing induction of MET signaling by malaria parasite and therefore inhibiting or preventing malaria infection.

[0348] RON (recepteur d'origine nantais; also known as macrophage stimulating 1 receptor) is another member of the MET subfamily of RTKs. A ligand for RON is macrophage-stimulating protein (MSP). RON is expressed in cells of epithelial origin. RON plays a role in epithelial cancers including lung cancer and colon cancers. RON and MET are expressed in ovarian cancers and are suggested to confer a selective advantage to cancer cells, thus promoting cancer progression. RON also is overexpressed in certain colorectal cancers. Germline mutations in the RON gene have been linked to human tumorigenesis. RON isoforms can be used to modulate RON, such as by modulating RON activity in diseases and conditions where RON is overexpressed.

[0349] The RON protein (GenBank No. NP_{—}002438 set forth as SEQ ID NO:277) is characterized by a Sema domain between amino acids 58-507, a plexin cysteine rich domain between amino acids 526-568, three IPT/TIG domains (between amino acids 569-671, amino acids 684-767, and amino acids 770-860), a transmembrane domain between amino acids 960-982 and cytoplasmic protein kinase domain between amino acids 1082-1341.

[0350] RON receptors include allelic variants of RON. In one example, an allelic variant contains one or more amino acids changes compared to SEQ ID NO:277, such as those set forth in SEQ ID NO:308. For example, one or more amino acid variations can occur in the Sema domain of RON. An allelic variant can include single nucleotide polymorphisms (SNP) at position 113 (SNP No. 3733136) where, for example, G is replaced by S, or at position 209 where, for example, G is replaced by A, or at position 322 (SNP No. 2230593) where, for example, Q is replaced by R, or at position 440 (SNP No. 2230592) where, for example, N is replaced by S. An amino acid variation also can occur at position 523 (SNP No. 2230590) where, for example, R is replaced by Q, or at position 946 (SNP No. 13078735) where, for example V is replaced by M. Additionally, one or more amino acid variations can occur in the protein kinase domain of RON. An allelic variant can include amino acid changes at position 1195 (SNP No. 7433231) where, for example, G is replaced by S, or at position 1335 (SNP No. 1062633) where, for example, R is replaced by G, or at position 1232 where, for example, D is replaced by V, or at position 1254 where, for example, M is replaced by T. In one example, an allelic variant includes one or more amino acid changes compared to SEQ ID NO:277 and the variant exhibits a change in a biological activity. Allelic variants, for example in the context of a wildtype or predominant form of the receptor, can be associated with a disease or condition. For example, amino acid changes occurring in the tyrosine kinase domain of RON, such as at positions corresponding to 1232 and 1254 of SEQ ID NO:277, can be associated with oncogenic cell transformation and tumor development by causing cellular accumulation of b-catenin whereby increases in the levels of b-catenin are associated with cancer.

[0351] SEQ ID NOS: 129, 216, 218 and 220 set forth exemplary RON isoforms. Exemplary RON isoforms lack one or more domains or a part thereof compared to a cognate RON such as set forth in SEQ ID NO:277. For example, exemplary RON isoforms set forth as SEQ ID NOS: 129, 216, 218 and 220 lack a transmembrane domain and protein kinase domain. The exemplary RON isoform set forth as SEQ ID NO:129 is characterized by a truncated Sema domain between amino acids 58-495. SEQ ID NO: 129 does not contain the plexin cysteine rich domain and IPT/TIG domains. The exemplary RON isoform set forth as SEQ ID NO: 216 also is characterized by a truncated Sema domain between amino acids 58-410, a complete plexin cysteine rich domain between amino acids 420-462, and a portion of an IPT/TIG domain between amino acids 463-521. The exemplary RON isoform set forth as SEQ ID NO: 220 contains complete Sema and plexin cysteine rich domains as well as a portion of an IPT/TIG domain between amino acids 569-627. SEQ ID NO: 218 sets forth an exemplary RON isoform that contains a complete Sema domain, plexin cysteine rich domain, and three IPT/TIG domains.

[0352] RON isoforms, including RON isoforms herein, also can include allelic variation in the RON polypeptide. For example a RON isoform can include one or more amino acid differences present in an allelic variant. In one example, a RON isoform includes one or more allelic variations as set forth in SEQ ID NO:308. An allelic variant can include one or more amino acid changes in the Sema domain, such as at positions 113, 209, 322. or 440. An allelic variant also can include one or more amino acid change, such as at position 523.

[0353] 7. Vascular Endothelial Growth Factor (VEGF)

[0354] The vascular endothelial growth factor (VEGF) is a family of closely related growth factors with a conserved pattern of eight cysteine residues and sharing common VEGF receptors. VEGF receptors include VEGFR-1 (Flt-1) VEGFR-2 (Flk-1/KDR), and VEGFR-3 (Flt-4). Ligands for VEGF receptors include vascular endothelial growth factor-A (also known as vasculotropin (VAS) or vascular permeability factor (VPF)), VEGF-B, VEGF-C, VEGF-D and placental growth factor (P1GF). The VEGF proteins and receptors play an important role in many aspects of angiogenesis, including cell migration, proliferation and tube formation, thus linking these proteins to the pathogenesis of many types of cancer. Flt-1, Flk, and Flt-4/KDR are genes encoding VEGFR family members.

[0355] Exemplary RTK-isoforms for targeting VEGFR-related diseases and conditions include VEGFR isoforms set forth in SEQ ID NOS: 99-102, 110, 123, 125, 127, 224 and 226. Such isoforms can be used in the treatment of acute inflammatory disease, such as Kawasaki disease, rheumatoid arthritis, diabetic retinopathy, retinopathy and psoriasis, as well as re-regulation of abnormal angiogenesis. Additionally VEGFR-isoforms can be used for treatment of cancers including breast carcinoma.

[0356] a. VEGFR-1 (Flt-1)

[0357] Flt-1 (fms-like tyrosine kinase-1) is a member of the VEGF receptor family of tyrosine kinases. Ligands for Flt-1 include VEGF-A and P1GF (placental growth factor). Since Flt-1 and its ligands are important for angiogenesis, disregulation of these proteins have significant impacts on a variety of diseases stemming from abnormal angiogenesis, such as proliferation or metastasis of solid tumors, rheumatoid arthritis, diabetic retinopathy, retinopathy and psoriasis. Flt-1 also has been implicated in Kawasaki disease, a systemic vasculitis with microvascular hyperpermeability.

[0358] The VEGFR-1 polypeptide set forth as SEQ ID NO:282 (GenBank No. NP_{—}002010) is characterized by four immunoglobulin-like domains; domain 1 between amino acids 231-337, domain 2 between 332-427, domain 3 between amino acids 558-656, and domain 4 between amino acids 661-749. VEGR-1 also contains a transmembrane domain between amino acids 764-780 and protein kinase domain between amino acids 827-1154.

[0359] SEQ ID NOS: 99-102, 110 and 123 set forth exemplary VEGFR-1 isoforms. The exemplary VEGFR-1 isoforms lack one or more domains or a part thereof compared to a cognate VEGFR-1 such as set forth in SEQ ID NO:282. For example, the exemplary VEGFR-1 isoforms lack a transmembrane domain and protein kinase domain compared to a cognate VEGFR-1 (e.g. SEQ ID NO:282). Such isoforms also can lack additional domains or portions of domains of a cognate VEGFR-1. The exemplary VEGFR-1 isoforms set forth as SEQ ID NOS: 99, 100 and 110 contain two immunoglobulin-like domains between amino acids 231-337 and between amino acids 332-427, but do not contain immunoglobulin-like domains 2 and 3. The exemplary VEGFR-1 isoform set forth as SEQ ID NO: 101 contains immunoglobulin-like domain 1 between amino acids 231-337 and a portion of immunoglobulin-like domain 2 between amino acids 332-394. The exemplary VEGFR-1 isoform set forth as SEQ ID NO: 102 contains a portion of one immunoglobulin-like domain between amino acids 231-331. VEGFR-1 isoforms, including VEGFR-1 isoforms herein, can include allelic variation in the VEGFR-1 polypeptide, such as one or more amino acid changes compared to a cognate VEGFR-1 polypeptide (e.g., SEQ ID NO: 282).

[0360] b. VEGFR-2 (KDR/Flk-1)

[0361] VEGFR-2 (KDR/Flk-1) is a member of the VEGF receptor family of tyrosine kinases. Ligands for VEGFR-2 includes VEGF. VEGF interacts with its receptors, VEGFR-2 and VEGFR-1, expressed on endothelial and hematopoietic stem cells, and thereby promotes recruitment of these cells to neo-angiogenic sites, accelerating the revascularization process. As such, VEGF is found in several types of tumors and has a tumoral angiogenic activity in vitro and in vivo. The interaction of VEGF with VEGFR-1 mediates cell migration whereas the interaction of VEGF with VEGFR-2 mediates cell proliferation. The VEGFR-2 receptor is the main human receptor responsible for the VEGF activity in physiological and pathological vascular development, and VEGF-KDR signaling pathway is a potential target for the development of anti- and pro-angiogenic agents.

[0362] The VEGFR-2 protein (GenBank No. NP_{—}002244 set forth as SEQ ID NO:283) is characterized by three immunoglobulin-like domains; domain 1 between amino acids 224-325, domain 2 between amino acids 333-418, and domain 3 between amino acids 666-766. VEGFR-2 also contains a transmembrane domain between amino acids 763-785 and protein kinase domain between amino acids 834-1160.

[0363] VEGFR-2 proteins include allelic variants of VEGFR-2. In one example, an allelic variant contains one or more amino acids changes compared to SEQ ID NO: 283. For example, one or more amino acid variations can occur in the immunoglobulin-like domain of VEGFR-2. An allelic variant can include single nucleotide polymorphisms (SNP) at position 297 (SNP No: 2305948) where, for example, V can be replaced by I, or at position 349 (SNP No: 1824302) where, for example, R can be replaced by K, or at position 392 (SNP No: 2034964) where, for example, D can be replaced by N. Additionally, one or more amino acid variations can occur in the protein kinase domain of VEGFR-2. An allelic variant can include amino acid changes at position 835 (SNP No: 1139775) where, for example, K is replaced by N, or at position 848 (SNP No: 1139776) where, for example, V is replaced by E, or at position 952 (SNP No: 13129474) where, for example, V is replaced by I. One or more amino acid changes also can occur in the transmembrane domain. An allelic variant can include amino acid changes at position 772 (SNP No: 1062832) where, for example A is replaced by T. An amino acid variation also can occur at position 472 (SNP No: 1870377) where, for example, Q is replaced by H, or at position 787 (SNP No: 1139774) where, for example, R is replaced by G, or at position 1147 where, for example, P is replaced by S, or at position 1210 (SNP No: 11540507) where, for example, P is replaced by I, or at position 1347 (SNP No: 1139777) where, for example, S is replaced by T. In one example, an allelic variant includes one or more amino acid changes compared to SEQ ID NO:283 and the variant exhibits a change in biological activity. Allelic variants, for example in the context of a wildtype or predominant form of the receptor, can be associated with a disease or condition. For example, amino acid changes occurring in the kinase domain of VEGFR-2, such as at position 1147 described herein, can be associated with tumors such as those found in Juvenile hemangiomas. An exemplary VEGFR-2 allelic variant containing one or more amino acid changes described above is set forth as SEQ ID NO: 313.

[0364] Exemplary isoforms of VEGFR-2 include isoforms lacking one or more domains or a part thereof compared to a cognate VEGFR-2 such as set forth in SEQ ID NO:283. Such isoforms include the isoform set forth in SEQ ID NO: 224 that does not contain transmembrane or protein kinase domains. The exemplary VEGFR-2 isoform set forth as SEQ ID NO:224 is characterized by immunoglobulin-like domains between amino acids 224-325, amino acids 333-418, and a portion of a third immunoglobulin-like domain between amino acids 666-691.

[0365] VEGFR-2 isoforms, including VEGFR-2 isoforms herein, can include allelic variation in the VEGFR-2 polypeptide. For example a VEGFR-2 isoform can include one or more amino acid differences present in an allelic variant. In one example, a VEGFR-2 isoform includes one or more allelic variations as set forth in SEQ ID NO:313. An allelic variant can include one or more amino acid changes in the immunoglobulin-like domain, such as at positions 297, 349, or 392. Allelic variants also can include one or more amino acid change such as at position 472.

[0366] c. VEGFR-3

[0367] VEGFR-3 is expressed predominantly in lymphatic endothelial cells. VEGFR-3 signaling is crucial for development and maintenance of lymphatic vessels. Mouse models expressing VEGFR-3 can be used to assess effects on lymphatic tissue development and maintenance in the presence of VEGFR-3 isoforms. VEGFR-3 also can have effects on blood vascular endothelium.

[0368] The VEGFR-3 polypeptide (GenBank No. NP_{—}002011 set forth as SEQ ID NO:284) is characterized by four immunoglobulin-like domains; domain 1 between amino acids 231-328, domain 2 between amino acids 349-398, domain 3 between amino acids 571-655 and domain 4 between amino acids 677-766. VEGFR-3 also contains a transmembrane domain between amino acids 776-798 and protein kinase domain between amino acids 845-1169.

[0369] VEGFR-3 polypeptides include allelic variants of VEGFR-3. In one example, an allelic variant contains one or more amino acids changes compared to SEQ ID NO: 284. For example, one or more amino acid variations can occur in the protein kinase domain of VEGFR-3. An allelic variant can include single nucleotide polymorphisms (SNP) at position 854 where, for example, G can be replaced by S, or at position 890 (SNP No: 448012) where, for example, Q can be replaced by H, or at position 915 where, for example, A can be replaced by P, or at position 916 where, for example, C and be replaced by W, or at position 933 where, for example, G can be replaced by R, or at position 954 where, for example, P can be replaced by S, or at position 1008 where, for example, P can be replaced by L, or at position 1041 where, for example, R can be replaced by W or Q, or at position 1137 where, for example, P can be replaced by L, or at position 1164 (SNP No: 1049080) where, for example, D can be replaced by E. An amino acid variation also can occur at position 24 where, for example, D is replaced by G, or at position 134 where, for example, D is replaced by G, or at position 149 where, for example, N can be replaced by D, or at position 494 (SNP No: 307826) where, for example T can be replaced by A, or at position 1189 (SNP No: 744282) where, for example, R can be replaced by C. In one example, an allelic variant includes one or more amino acid changes compared to SEQ ID NO:284 and the variant exhibits a change in a biological activity. Amino acid changes occurring in the tyrosine kinase domain can interfere with VEGFR-3 signaling, such as those described herein at positions 854, 915, 916, 933, 1041, and 1137. Allelic variants, for example in the context of a wildtype or predominant form of the receptor, can be associated with a disease or condition. For example, amino acid changes occurring in the tyrosine kinase domain can be associated with primary congenital lymphoedema; amino acid changes at position 954 can be associated with tumors such as juvenile hemangiomas. An exemplary VEGFR-3 allelic variant containing one or more amino acid changes described above is set forth as SEQ ID NO: 314.

[0370] Exemplary VEGFR-3 isoforms lack one or more domains or a part thereof compared to a cognate VEGFR-3 such as set forth in SEQ ID NO:284. SEQ ID NOS: 125, 127 and 226 set forth exemplary VEGFR-3 isoforms that lack a transmembrane and protein kinase domains. Such isoforms contain other domains of VEGFR-3. The exemplary VEGFR-3 isoform set forth as SEQ ID NO:226 is characterized by immunoglobulin-like domain 1 between amino acids 231-328, domain 2 between amino acids 349-398, domain 3 between amino acids 571-655, and a portion of a domain 4 between amino acids 677-723. SEQ ID NO: 127 is characterized by one immunoglobulin-like domain between amino acids 231-272.

[0371] VEGFR-3 isoforms, including VEGFR-3 isoforms herein, also can include allelic variation in the VEGFR-3 polypeptide, compared to a cognate VEGFR-3 receptor such as set forth in SEQ ID NO:284. For example a VEGFR-3 isoform can include one or more amino acid differences present in an allelic variant such as set forth in SEQ ID NO:314, for example at positions corresponding to amino acid position 24, 134, 149 or 494 of SEQ ID NO:284.

[0372] 8. TIE

[0373] Tie-1 and Tie-2/TEK (tyrosine kinase with immunoglobulin-like and EGF-like domains) receptors are endothelial RTKs with immunoglobulin and epidermal growth factor homology domains. Exemplary RTK-isoforms for targeting Tie/TEK receptors include RTK isoforms set forth in SEQ ID NO: 104, 105, 112, 113, 131, 133, 135, 137, 139, 141, 143 and 222. Such RTK isoforms can be used for treatment of diseases and conditions in which the Tie/Tek receptor is implicated, including anti-angiogenesis therapy in diseases such as cancer, eye diseases, and rheumatoid arthritis. Other diseases and conditions that can be treated with TIE/TEK isoforms include inflammatory diseases such as arthritis, rheumatism, and psoriasis, benign tumors and preneoplastic conditions, myocardial angiogenesis, hemophilic joints, scleroderma, vascular adhesions, atherosclerotic plaque neovascularization, telangiectasia, and wound granulation. Additional targets for TEK receptor isoforms include diseases in which TEK is overexpressed, for example, chronic myeloid leukemia.

[0374] a. Tie-1

[0375] Tie-1 is a receptor tyrosine kinase that plays an essential role in vascular development and angiogenesis where it is thought to be required for vessel maturation and stabilization. Tie-1 also acts as an antiapoptotic survival signal. Tie-1 expression is associated with endothelial cells and neovascularization and physically associates with the related receptor TEK. Tie-1 also is expressed in a variety of tumors and metastases including lung and breast and also is involved in thyroid tumorigenesis. Tie-1 is strongly induced during wound healing. The ligands responsible for activating Tie-1 remain unidentified.

[0376] The Tie-1 receptor set forth as SEQ ID NO:279 (GenBank No. NP_{—}005415 set forth as SEQ ID NO: 279) is characterized by two immunoglobulin domains between amino acids 139-197 and amino acids 365-428, an EGF domain between amino acids 224-255, a laminin EGF-like domain between amino acids 231-272, three fibronectin type III domains (between amino acids 446-533, amino acids 546-632, and amino acids 644-729), transmembrane domain between amino acids 764-786, and cytoplasmic protein kinase domain between 839-1107.

[0377] Tie-1 proteins include allelic variants of Tie-1. In one example, an allelic variant contains one or more amino acids changes compared to SEQ ID NO: 279. For example, one or more amino acid variations can occur in the immunoglobulin domain of Tie-1. An allelic variant can include single nucleotide polymorphisms (SNP) at position 142 (SNP No: 11545380) where, for example, A can be replaced by T. An amino acid variation also can occur at position 1109 (SNP No: 6698998) where, for example, R is replaced by C. An exemplary Tie-1 allelic variant containing one or more amino acid changes described above is set forth as SEQ ID NO: 310.

[0378] Exemplary Tie-1 isoforms lack one or more domains or a part thereof compared to a cognate Tie-1 such as set forth in SEQ ID NO:279. For example, the exemplary Tie-1 isoforms provided herein lack transmembrane and protein kinase domains. Such exemplary Tie-1 isoforms include the Tie-1 isoforms set forth in SEQ ID NOS: 113, 135, 137, 139, 141, 143 and 222. These isoforms contain other domains of the Tie-1 receptor. The exemplary Tie-1 isoform set forth as SEQ ID NOS: 113 and 222 are characterized by two immunoglobulin domains between amino acids 139-197 and amino acids 365-428, an EGF domain between amino acids 224-255, a laminin EGF-like domain between amino acids 231-272, and three fibronectin type III domains (between amino acids 446-533, amino acids 546-632, and amino acids 644-729). The exemplary Tie-1 isoforms set forth as SEQ ID NOS: 137, 141 and 143 contain an immunoglobulin domain between amino acids 139-197, an EGF domain between amino acids 224-255 and a laminin EGF-like domain between amino acids 231-272. The exemplary Tie-1 isoforms set forth as SEQ ID NOS: 135 and 139 contain at least a portion of the immunoglobulin domain.

[0379] Tie-1 isoforms, including Tie-1 isoforms herein, can include allelic variation in the Tie-1 polypeptide. For example, a Tie-1 isoform can include one or more amino acid differences compared to a cognate Tie-1 receptor (e.g. SEQ ID NO:279). In one example, a Tie-1 isoform includes one or more allelic variations as set forth in SEQ ID NO:310. For example, an allelic variant of a Tie-1 isoform can include an amino acid change in the immunoglobulin domain, such as at position 142.

[0380] b. Tie-2 (TEK)

[0381] The known ligands for Tie-2/TEK include angiopoietin (Ang)-1 and Ang-2. These RTKs play an important role in the development of the embryonic vasculature and continue to be expressed in adult endothelial cells. Tie-2/TEK is a RTK that is expressed almost exclusively by vascular endothelium. Expression of Tie-2/TEK is important for the development of the embryonic vasculature. Overexpression and/or mutation of Tie-2/TEK has been linked to pathogenic angiogenesis, and thus tumor growth, as well as myeloid leukemia.

[0382] The Tie-2/TEK protein (GenBank No. NP_{—}000450 set forth as SEQ ID NO:278) is characterized by a laminin EGF-like domain between amino acids 219-268, three fibronectin type III domains (between amino acids 444-529, amino acids 543-626, and amino acids 639-724), a transmembrane domain between amino acids 748-770, and cytoplasmic protein kinase domain between amino acids 824-1092.

[0383] TEK proteins include allelic variants of TEK. In one example, an allelic variant contains one or more amino acids changes compared to SEQ ID NO: 278. For example, one or more amino acid variations can occur in fibronectin type III domain of TEK. An allelic variant can include single nucleotide polymorphisms (SNP) at position 486 (SNP No: 1334811) where, for example, V can be replaced by I, or at position 695 where, for example, I can be replaced by T, or at position 724 (SNP No. 4631561) where, for example, A can be replaced by T. An allelic variant also can occur in the protein kinase domain of TEK. An allelic variant can include amino acid changes at position 849 where, for example, R can be replaced by W. An amino acid variation also can occur at position 346 where, for example, P can be replaced by Q. In one example, an allelic variant includes one or more amino acid changes compared to SEQ ID NO:278 and the variant exhibits a change in a biological activity. Allelic variants, for example in the context of a wildtype or predominant form of the receptor, can be associated with a disease or condition. For example, amino acid changes occurring in the kinase domain of TEK receptor, such as at position 849, can be associated with vascular dysmorphogenesis due to increased activity of TEK. An exemplary TEK allelic variant containing one or more amino acid changes described above is set forth as SEQ ID NO: 309.

[0384] Exemplary Tie-2/TEK isoforms lack one or more domains or a part thereof compared to a cognate TEK such as set forth in SEQ ID NO:278. For example, exemplary TEK isoforms set forth in SEQ ID NOS: 104, 105, 112, 131 and 133 lack a transmembrane domain and kinase domain. Tie-2/TEK isoforms can contain other domains of a Tie-2/TEK cognate receptor. The exemplary TEK isoforms set forth as SEQ ID NO: 104 contains a laminin EGF-like domain between amino acids 219-268 and three fibronectin type III domains between amino acids 401-486, amino acids 500-580, and amino acids 593-678. The exemplary TEK isoforms set forth as SEQ ID NO: 105 contains a laminin EGF-like domain between amino acids 219-268 and three fibronectin type III domains between amino acids 444-529, amino acids 543-623, and amino acids 636-721. The exemplary TEK isoforms set forth as SEQ ID NO: 112 contains a laminin EGF-like domain between amino acids 196-245 and three fibronectin type III domains between amino acids 378-463, amino acids 477-557, and amino acids 570-655. The exemplary TEK isoform set forth as SEQ ID NO: 131 contains a laminin EGF-like domain between amino acids 219-268, but is missing the three fibronectin type III domains. The exemplary TEK isoform set forth as SEQ ID NO: 133 contains a laminin EGF-like domain between amino acids 219-268 and a portion of a fibronectin type III domain between amino acids 444-497.

[0385] TEK isoforms, including TEK isoforms herein, can include allelic variation in the TEK polypeptide. For example, a TEK isoform can include one or more amino acid differences present in an allelic variant. In one example, a TEK isoform includes one or more allelic variations as set forth in SEQ ID NO:309. An allelic variant can include one or more amino acid change in the fibronectin type III domain, such as at position 486 or 695. An allelic variant also can include one or more amino acid change, such as at position 346.

[0386] 9. Tumor Necrosis Factor Receptors (TNFRs)

[0387] The TNF (tumor necrosis factor) ligand and receptor family regulate a variety of signal transduction pathways including those involved in cell differentiation, activation, and viability. TNFRs have a characteristic repeating extracellular cysteine-rich motif and a variable intracellular domain that differs between members of the TNFR family. The TNFR family of receptors includes, but is not limited to, TNFR1, TNFR2, TNFRrp, the low-affinity nerve growth factor receptor, Fas antigen, CD40, CD27, CD30, 4-1BB, OX40, DR3, DR4, DR5, and herpesvirus entry mediator (HVEM). Ligands for TNFRs include TNF-α, lymphotoxin, nerve growth factor, Fas ligand, CD40 ligand, CD27 ligand, CD30 ligand, 4-1BB ligand, OX40 ligand, APO3 ligand, TRAIL and LIGHT. TNFRs include an extracellular domain, including a ligand binding domain, a transmembrane domain and an intracellular domain that participates in signal transduction. Additionally, TNFRs are typically trimeric proteins that trimerize at the cell surface. Trimerization is important for biological activity of TNFRs.

[0388] TNF plays a key role in inflammatory and infectious diseases. TNF binds two receptors, TNFR1 and TNFR2 that can transduce intracellular signals when expressed on the cell surface. TNFR1 is a major mediator of biological signaling involved in cell apoptosis, cytotoxicity, fibroblast proliferation, synthesis of prostaglandin E2 and resistance to Chlamydia. TNFR2 is involved in proliferation of thermocytes, TNF-dependent proliferative response to mononuclear cells, induction of GM-CSF secretion, inhibition of early hematopoiesis, and down-regulating activated T cells by inducing apoptosis. TNFR1 and TNFR2 also are produced as soluble forms by proteolytic cleavage (sTNFR). Increased levels of sTNFRs have been found in inflammatory and infectious diseases.

[0389] TNF/TNFRs are targets for many viruses. Viruses can bind to and sequester host cytokines, such as TNF, thus allowing the virus to escape the immune system. Many viruses encode proteins that mimic TNFR by binding TNF or that are viral homologs of TNFR. Viruses can upregulate TNF gene activity and/or expression, modulate TNF/TNFR effects, and bind to TNFR. TNFR isoforms, such as described herein, can be used to modulate TNFRs, including viral TNFR homologs and mimics. Examples of viruses that interact with TNF/TNFRs and are targets for TNFR isoforms include, but are not limited to, DNA viruses including Myxoma virus, Vaccinia virus, Tanapox virus, Epstein-Barr virus, Herpes simplex virus, Cytomegalovirus, Herpesvirus saimiri, Hepatitis B virus, African swine fever virus and Parovirus, and RNA viruses including Human Immune deficiency virus (HIV), Hepatitis C virus, Influenza virus, Respiratory syncytial virus, Measles virus, Vesicular stomatitis virus, Dengue virus and Ebola virus (see for example, Herbein et al. (2000) Proc Soc Exp Biol Med. 223(3):241-57). Exemplary TNFR isoforms include isoforms of TNFR1 such as set forth in SEQ ID NO: 95.

[0390] a. TNFR1

[0391] The TNFR1 polypeptide set forth as SEQ ID NO:280 (GenBank No. NP_{—}001056) is characterized by three TNFR c6 domains (between amino acids 44-81, amino acids 84-125, and amino acids 127-166), a transmembrane domain between amino acids 212-234, and a death domain between amino acids 357-441 within the cytoplasmic tail. The TNFR c6 domains are cysteine-rich domains at the N-terminal region that can be subdivided into repeats containing six conserved cysteines, all of which are involved in intrachain disulfide bonds. Death domains are characteristic of the TNFR1 receptor family and are involved in initiating apoptosis and NF-κB and other signaling pathways upon ligand binding.

[0392] TNFR1 polypeptides include allelic variants of TNFR1. In one example, an allelic variant contains one or more amino acids changes compared to SEQ ID NO: 280. For example, one or more amino acid variations can occur in the c6 domains of TNFR1. An allelic variant can include single nucleotide polymorphisms (SNP) at position 75 (SNP No: 4149637) where, for example, P can be replaced by I, or at position 121 (SNP No. 4149584) where, for example, R can be replaced by Q. An amino acid variation also can occur at position 305 where, for example, P can be replaced by T. An exemplary TNFR1 allelic variant containing one or more amino acid changes described above is set forth as SEQ ID NO: 311.

[0393] b. TNFR2

[0394] TNFR2 (GenBank No. NP_{—}001057 set forth as SEQ ID NO:281) is characterized by three TNFR c6 domains between amino acids 40-75, amino acids 78-118 and amino acids 120-161 and a transmembrane domain between amino acids 258-280. TNFR2 proteins include allelic variants of TNFR2. In one example, an allelic variant contains one or more amino acids changes compared to SEQ ID NO: 281. For example, one or more amino acid variations can occur in the transmembrane domain. An allelic variant can include single nucleotide polymorphisms at position 295 (SNP No: 5746032) where, for example, Q can be replaced by R. An amino acid variation also can occur at position 187 (SNP No: 5746025) where, for example, V can be replaced by M, or at position 196 (SNP No: 1061622) where, for example, M can be replaced by R, or at position 232 (SNP No: 5746026) where, for example, E can be replaced by K, or at position 236 (SNP No: 5746027) where, for example, A can be replaced by T, or at position 264 (SNP No: 5746031) where, for example, L can be replaced by P. In one example, an allelic variant includes one or more amino acid changes compared to SEQ ID NO:281 and the variant exhibits a change in a biological activity. Allelic variants, for example in the context of a wildtype or predominant form of the receptor, can be associated with a disease or condition. For example, amino acid changes occurring at position 196, for example, can be associated with autoimmune disease such as rheumatoid arthritis and acute graft-versus-host disease and diseases associated with polycystic ovary syndrome and hyperandrogenism. An exemplary TNFR2 allelic variant containing one or more amino acid changes described above is set forth as SEQ ID NO: 312.

[0395] Exemplary TNFR2 isoforms lack one or more domains or a part thereof compared to a cognate TNFR2 such as set forth in SEQ ID NO:281. The exemplary TNFR2 isoform set forth as SEQ ID NO:95 lacks a transmembrane domain. Additionally, this isoform is characterized by TNFR c6 domains between amino acids 40-75 and amino acids 78-118 as well as a portion of a third c6 domain between amino acids 120-152.

### G. Methods of Producing Nucleic Acid Encoding CSR Isoforms and Methods of Producing CSR Isoform Polypeptides

[0396] Exemplary methods for generating CSR isoform nucleic acid molecules and polypeptides are provided herein. Such methods include in vitro synthesis methods for nucleic acid molecules such as PCR, synthetic gene construction and in vitro ligation of isolated and/or synthesized nucleic acid fragments. CSR isoform nucleic acid molecules also can be isolated by cloning methods, including PCR of RNA and DNA isolated from cells and screening of nucleic acid molecule libraries by hybridization and/or expression screening methods.

[0397] CSR isoform polypeptides can be generated from CSR isoform nucleic acid molecules using in vitro and in vivo synthesis methods. CSR isoforms can be expressed in any organism suitable to produce the required amounts and forms of isoform needed for administration and treatment. Expression hosts include prokaryotic and eukaryotic organisms such as E. coli, yeast, plants, insect cells, mammalian cells, including human cell lines and transgenic animals. CSR isoforms also can be isolated from cells and organisms in which they are expressed, including cells and organisms in which isoforms are produced recombinantly and those in which isoforms are synthesized without recombinant means such as genomically-encoded isoforms produced by alternative splicing events.

[0398] 1. Synthetic Genes and Polypeptides

[0399] CSR isoform nucleic acid molecules and polypeptides can be synthesized by methods known to one of skill in the art using synthetic gene synthesis. In such methods, a polypeptide of a CSR isoform is “back-translated” to generate one or more nucleic acid molecules encoding an isoform. The back-translated nucleic acid molecule is then synthesized as one or more DNA fragments such as by using automated DNA synthesis technology. The fragments are then operatively linked to form a nucleic acid molecule encoding an isoform. Nucleic acid molecules also can be joined with additional nucleic acid molecules such as vectors, regulatory sequences for regulating transcription and translation and other polypeptide-encoding nucleic acid molecules. Isoform-encoding nucleic acid molecules also can be joined with labels such as for tracking, including radiolabels, and fluorescent moieties.

[0400] The process of backtranslation uses the genetic code to obtain a nucleotide gene sequence for any polypeptide of interest, such as a CSR isoform. The genetic code is degenerate, 64 codons specify 20 amino acids and 3 stop codons. Such degeneracy permits flexibility in nucleic acid design and generation, allowing for example restriction sites to be added to facilitate the linking of nucleic acid fragments and the placement of unique identifier sequences within each synthesized fragment. Degeneracy of the genetic code also allows the design of nucleic acid molecules to avoid unwanted nucleotide sequences, including unwanted restriction sites, splicing donor or acceptor sites, or other nucleotide sequences potentially detrimental to efficient translation. Additionally, organisms sometimes favor particular codon usage and/or a defined ratio of GC to AT nucleotides. Thus, degeneracy of the genetic code permits design of nucleic acid molecules tailored for expression in particular organisms or groups of organisms. Additionally, nucleic acid molecules can be designed for different levels of expression based on optimizing (or non-optimizing) of the sequences. Back-translation is performed by selecting codons that encode a polypeptide. Such processes can be performed manually using a table of the genetic code and a polypeptide. Alternatively, computer programs, including publicly available software can be used to generate back-translated nucleic acid sequences.

[0401] To synthesize a back-translated nucleic acid molecule, any method available in the art for nucleic acid synthesis can be used. For example, individual oligonucleotides corresponding to fragments of a CSR isoform-encoding sequence of nucleotides are synthesized by standard automated methods and mixed together in an annealing or hybridization reaction. Such oligonucleotides synthesized by such annealing result in the self-assembly of the gene from the oligonucleotides using overlapping single-stranded overhangs formed upon duplexing complementary sequences, generally about 100 nucleotides in length. Single nucleotide “nicks” in the duplex DNA are sealed using ligation, for example with bacteriophage T4 DNA ligase. Restriction endonuclease linker sequences can for example, then be used to insert the synthetic gene into any one of a variety of recombinant DNA vectors suitable for protein expression. In another, similar method, a series of overlapping oligonucleotides are prepared by chemical oligonucleotide synthesis methods. Annealing of these oligonucleotides results in a gapped DNA structure. DNA synthesis catalyzed by enzymes such as DNA polymerase I can be used to fill in these gaps, and ligation is used to seal any nicks in the duplex structure. PCR and/or other DNA amplification techniques can be applied to amplify the formed linear DNA duplex.

[0402] Additional nucleotide sequences can be joined to a CSR isoform-encoding nucleic acid molecule, including linker sequences containing restriction endonuclease sites for the purpose of cloning the synthetic gene into a vector, for example, a protein expression vector or a vector designed for the amplification of the core protein coding DNA sequences. Furthermore, additional nucleotide sequences specifying functional DNA elements can be operatively linked to an isoform-encoding nucleic acid molecule. Examples of such sequences include, but are not limited to, promoter sequences designed to facilitate intracellular protein expression, and secretion sequences designed to facilitate protein secretion. Additional nucleotide sequences such as sequences specifying protein binding regions also can be linked to isoform-encoding nucleic acid molecules. Such regions include, but are not limited to, sequences to facilitate uptake of an isoform into specific target cells, or otherwise enhance the pharmacokinetics of the synthetic gene.

[0403] CSR isoforms also can be synthesized using automated synthetic polypeptide synthesis. Cloned and/or in silico-generated polypeptides can be synthesized in fragments and then chemically linked. Alternatively, isoforms can be synthesized as a single polypeptide. Such polypeptides then can be used in the assays and treatment administrations described herein.

[0404] 2. Methods of Cloning and Isolating CSR Isoforms

[0405] CSR isoforms can be cloned or isolated using any available methods known in the art for cloning and isolating nucleic acid molecules. Such methods include PCR amplification of nucleic acids and screening of libraries, including nucleic acid hybridization screening, antibody-based screening and activity-based screening.

[0406] Methods for amplification of nucleic acids can be used to isolate nucleic acid molecules encoding an isoform, including for example, polymerase chain reaction (PCR) methods. A nucleic acid containing material can be used as a starting material from which an isoform-encoding nucleic acid molecule can be isolated. For example, DNA and mRNA preparations, cell extracts, tissue extracts, fluid samples (e.g. blood, serum, saliva), samples from healthy and/or diseased subjects can be used in amplification methods. Nucleic acid libraries also can be used as a source of starting material. Primers can be designed to amplify an isoform. For example, primers can be designed based on expressed sequences from which an isoform is generated. Primers can be designed based on back-translation of an isoform amino acid sequence. Nucleic acid molecules generated by amplification can be sequenced and confirmed to encode an isoform.

[0407] Nucleic acid molecules encoding isoforms also can be isolated using library screening. For example, a nucleic acid library representing expressed RNA transcripts as cDNA molecules can be screened by hybridization with nucleic acid molecules encoding CSR isoforms or portions thereof. For example, an intron sequence or portion thereof from a CSR gene can be used to screen for intron retention containing molecules based on hybridization to homologous sequences. Expression library screening can be used to isolate nucleic acid molecules encoding a CSR isoform. For example, an expression library can be screened with antibodies that recognize a specific isoform or a portion of an isoform. Antibodies can be obtained and/or prepared which specifically bind to a CSR isoform or a region or peptide contained in an isoform. Antibodies which specifically bind to an isoform can be used to screen an expression library containing nucleic acid molecules encoding an isoform, such as an intron fusion protein. Methods of preparing and isolating antibodies, including polyclonal and monoclonal antibodies and fragments therefrom are well known in the art. Methods of preparing and isolating recombinant and synthetic antibodies also are well known in the art. For example, such antibodies can be constructed using solid phase peptide synthesis or can be produced recombinantly, using nucleotide and amino acid sequence information of the antigen binding sites of antibodies that specifically bind to a candidate polypeptide. Antibodies also can be obtained by screening combinatorial libraries containing variable heavy chains and variable light chains, or antigen-binding portions thereof. Methods of preparing, isolating and using polyclonal, monoclonal and non-natural antibodies are reviewed, for example, in Kontermann and Dubel, eds. (2001) “Antibody Engineering” Springer Verlag; Howard and Bethell, eds. (2001) “Basic Methods in Antibody Production and Characterization” CRC Press; and O'Brien and Aitkin, eds. (2001) “Antibody Phage Display” Humana Press. Such antibodies also can be used to screen for the presence of an isoform polypeptide, for example, to detect the expression of a CSR isoform in a cell, tissue or extract.

[0408] 3. Synthetic Isoforms

[0409] A variety of synthetic forms of the isoforms are provided. Included among them are conjugates in which the isoform or intron-encoded portion thereof is linked directly or via linker to another agent, such as a targeting agent or to a molecule the present or provides the intron-encoded portion or isoform portion to the CSR so that an activity of the CSR is modulated. Other synthetic forms include chimeras in which the extracellular domain portion and C-terminal portion, such as an intron-encoded portion, are from different isoforms. Also provided are “peptidomimetic” isoforms in which one or more bonds in the peptide backbone is (are) replaced by a bioisotere or other bond such that the resulting polypeptide peptidomimetic has improved properties, such as resistance to proteases, compared to the unmodified form.

[0410] a. Isoform Conjugates

[0411] CSR isoforms also can be provided as conjugates between the isoform and another agent. The conjugate can be used to target to a receptor with which the isoform interacts and/or to another targeted receptor for delivery of isoform. Such conjugates include linkage of a CSR isoform to a targeted agent and/or targeting agent. Conjugates can be produced by any suitable method including chemical conjugation or by expression of fusion proteins in which, for example, DNA encoding a targeted agent or targeting agent, with or without a linker region, is operatively linked to DNA encoding an RTK isoform. Conjugates also can be produced by chemical coupling, typically through disulfide bonds between cysteine residues present in or added to the components, or through amide bonds or other suitable bonds. Ionic or other linkages also are contemplated.

[0412] Pharmaceutical compositions can be prepared that contain CSR isoform conjugates and treatment effected by administering a therapeutically effective amount of a conjugate, for example, in a physiologically acceptable excipient. CSR isoform conjugates also can be used in in vivo therapy methods such as by delivering a vector containing a nucleic acid encoding a CSR isoform conjugate as a fusion protein.

[0413] Conjugates can contain one or more CSR isoforms linked, either directly or via a linker, to one or more targeted agents: (CSR isoform)n, (L)q, and (targeted agent)m in which at least one CSR isoform is linked directly or via one or more linkers (L) to at least one targeted agent. Such conjugates also can be produced with any portion of a CSR isoform sufficient to bind to a target, such as a target cell type for treatment. Any suitable association among the elements of the conjugate and any number of elements where n, and m are integer greater than 1 and q is zero or any integer greater then 1, is contemplated as long as the resulting conjugates interacts with a targeted CSR or targeted cell type.

[0414] Examples of a targeted agent include drugs and other cytotoxic molecules such as toxins that act at or via the cell surface and those that act intracellularly. Examples of such moieties, include radionuclides, radioactive atoms that decay to deliver, e.g., ionizing alpha particles or beta particles, or X-rays or gamma rays, that can be targeted when coupled to a CSR isoform. Other examples include chemotherapeutics that can be targeted by coupling with an isoform. For example, geldanamycin targets proteosomes. An isoform-geldanamycin molecule can be directed to intracellular proteosomes, degrading the targeted isoform and liberating geldanamycin at the proteosome. Other toxic molecules include toxins, such as ricin, saporin and natural products from conches or other members of phylum mollusca. Another example of a conjugate with a targeted agent is a CSR isoform coupled, for example as a protein fusion, with an antibody or antibody fragment. For example, an isoform can be coupled to an Fc fragment of an antibody that binds to a specific cell surface marker to induce killer T cell activity in neutrophils, natural killer cells, and macrophages. A variety of toxins are well known to those of skill in the art.

[0415] Conjugates can contain one or more CSR isoforms linked, either directly or via a linker, to one or more targeting agents: (CSR isoform)n, (L)q, and (targeting agent)m in which at least one CSR isoform is linked directly or via one or more linkers (L) to at least one targeting agent. Any suitable association among the elements of the conjugate and any number of elements where n, and m are integer greater than 1 and q is zero or any integer greater then 1, is contemplated as long as the resulting conjugates interacts with a target, such as a targeted cell type.

[0416] Targeting agents include any molecule that targets a CSR isoform to a target such as a particular tissue or cell type or organ. Examples of targeting agents include cell surface antigens, cell surface receptors, proteins, lipids and carbohydrate moieties on the cell surface or within the cell membrane, molecules processed on the cell surface, secreted and other extracellular molecules. Molecules useful as targeting agents include, but are not limited to, an organic compound; inorganic compound; metal complex; receptor; enzyme; antibody; protein; nucleic acid; peptide nucleic acid; DNA; RNA; polynucleotide; oligonucleotide; oligosaccharide; lipid; lipoprotein; amino acid; peptide; polypeptide; peptidomimetic; carbohydrate; cofactor; drug; prodrug; lectin; sugar; glycoprotein; biomolecule; macromolecule; biopolymer; polymer; and other such biological materials. Exemplary molecules useful as targeting agents include ligands for receptors, such as proteinaceous and small molecule ligands, and antibodies and binding proteins, such as antigen-binding proteins.

[0417] Alternatively, the CSR isoform, which specifically interacts with a particular receptor (or receptors) is the targeting agent and it is linked to targeted agent, such as a toxin, drug or nucleic acid molecule. The nucleic acid molecule can be transcribed and/or translated in the targeted cell or it can be regulatory nucleic acid molecule.

[0418] The CSR and be linked directly to the targeted (or targeting agent) or via a linker. Linkers include peptide and non-peptide linkers and can be selected for functionality, such as to relieve or decrease stearic hindrance caused by proximity of a targeted agent or targeting agent to a CSR isoform and/or increase or alter other properties of the conjugate, such as the specificity, toxicity, solubility, serum stability and/or intracellular availability and/or to increase the flexibility of the linkage between a CSR isoform and a targeted agent or targeting agent. Examples of linkers and conjugation methods are known in the art (see, for example, WO 00/04926). CSRs also can be targeted using liposomes and other such moieties that direct delivery of encapsulated or entrapped molecules.

[0419] b. Chimeric and Synthetic Intron Fusion Polypeptides

[0420] Also provided are chimeric and synthetic intron fusion polypeptides. These contain an intron from an intron fusion polypeptide operatively linked at the N-terminus to another polypeptide or other molecule such that the resulting molecule modulates the activity of a CSR, particularly an RTK, including any involved in pathways that participate in the inflammatory response, angiogenesis, neovascularization and/or cell proliferation. Included among these synthetic “polypeptides” are chimeric intron fusion polypeptides in which the N-terminus from the extracellular domain of a CSR is linked to the intron of an intron fusion protein, such as intron 8 of a herstatin (see, e.g., SEQ ID Nos. 320-345). Exemplary herstatins are set forth in SEQ ID Nos. 320-359. Table 3A below identifies the sequences. Other herstatin variants include allelic variants, particularly those with variation in the extracellular domain portion.

TABLE 3A

| | | SEQ ID NO | SEQ ID NO |
|---|---|---|---|
| Variant | Encoded Intron 8 | (nucleotide) | (amino acid) |
| Herstatin prominent | AA: 341-419 | | 320 |
| Intron 8 prominent- molecule in a bottle | | | 321 |
| Herstatin variant (AA 342: Thr or Ser) | AA: 341-419 | | 322 |
| Herstatin variant (AA 345: Leu or Pro | AA: 341-419 | | 323 |
| Herstatin variant (AA 346: Pro or Leu) | AA: 341-419 | | 324 |
| Herstatin variant (AA 356: Leu or Gln) | AA 341-419 | | 325 |
| Herstatin variant (AA 358: Met or Leu) | AA 341-419 | | 326 |
| Herstatin variant (AA 361: Gly, Asp, Ala, or Val) | AA 341-419 | | 327 |
| Herstatin variant (AA 376: Leu or Ile) | AA 341-419 | | 328 |
| Herstatin variant (AA 394: Pro or Arg) | AA 341-419 | | 329 |
| Herstatin variant (AA 404: Pro or Leu) | AA 341-419 | | 330 |
| Herstatin variant (AA 413: Asp or Asn) | AA 341-419 | | 331 |
| Herstatin variant (AA 357: Arg or Cys) | AA 341-419 | | 332 |
| Herstatin variant (AA 371: Arg or Ile) | AA 341-419 | | 333 |
| Intron 8 variant (AA 2: Thr or Ser) | | | 334 |
| Intron 8 variant (AA 5: Leu or Pro) | | | 335 |
| Intron 8 variant (AA 6: Pro or Leu) | | | 336 |
| Intron 8 variant (AA 16: Leu or Gln) | | | 337 |
| Intron 8 variant (AA 18: Met or Leu) | | | 338 |
| Intron 8 variant (AA 21: Gly, Asp, Ala, or Val) | | | 339 |
| Intron 8 variant (AA 36: Leu or Ile) | | | 340 |
| Intron 8 variant (AA 54: Pro or Arg) | | | 341 |
| Intron 8 variant (AA 64: Pro or Leu) | | | 342 |
| Intron 8 variant (AA 73: Asp or Asn) | | | 343 |
| Intron 8 variant (AA 17: Arg or Cys) | | | 344 |
| Intron 8 variant (AA 31: Arg or Ile) | | | 345 |
| Intron 8 prominent- molecule in a bottle | | 346 | |
| Intron 8 variant (nt 4: n = T) | | 347 | |
| Intron 8 variant (nt 14: n = C ) | | 348 | |
| Intron 8 variant (nt: 17: n = T) | | 349 | |
| Intron 8 variant (nt 47 = A) | | 350 | |
| Intron 8 variant (nt 54 = A) | | 351 | |
| Intron 8 variant (nt 62: n = C, T, A) | | 352 | |
| Intron 8 variant (nt 106 = A) | | 353 | |
| Intron 8 variant (nt 161 = G) | | 354 | |
| Intron 8 variant (nt 191: n = T) | | 355 | |
| Intron 8 variant (nt 217: C) | | 356 | |
| Intron 8 variant (nt 17: n = T and nt 217: n = C) | | 357 | |
| Intron 8 variant (nt 49: n = T) | | 358 | |
| Intron 8 variant (nt 92: n = T) | | 359 | |

[0421] The N-terminus portion can be linked to a C-terminus (intron-encoded portion) of the synthetic intron fusion protein directly or via a linker, such as a polypeptide linker or a chemical linker. Linkage can be effected by recombinant expression of a fusion protein where there is no linker or where the linker is a polypeptide. Chemical synthesis also can be employed. When the linker is not a polypeptide, linkage can be effected chemically.

[0422] Any suitable linker can be selected so long as the resulting molecule interacts with a CSR and modulates, typically inhibits, its activity. Linkers can be selected to add a desirable property, such as to increase serum stability, solubility and/or intracellular concentration and to reduce steric hindrance caused by close proximity when one or more linkers is (are) inserted between the N-terminal portion and intron-encoded portion. The resulting molecule is designed or selected to retain the ability to modulate the activity of a CSR, particularly RTKs, including any involved in pathways that are involved in inflammatory responses, neovascularization, angiogenesis and cell proliferation.

[0423] Linkers include chemical linkers and peptide linkers, such as peptides that increase flexibility or solubility of the linked moieties, and chemical linkers. For example linkers can be inserted using heterobifunctional reagents, such as those described below, or, can be linked by linking DNA encoding polypeptide linker to the DNA encoding the N-terminal (and/or C-terminal portion) and expressing the resulting chimera. In addition, where no linker is present the N-terminus can be linked directly to the intron encoded portion. In some embodiments, the N-terminus portion can be replaced by non-peptidic moiety that provides sufficient steric hindrance and bulk to permit the intron-encoded portion to interact with and modulate the activity of a receptor. As noted above, the N-terminus also can be selected to target the intron-encoded portion to selected CSRs or a selected CSR.

[0424] Exemplary linkers include, but are not limited to, (Gly4Ser)n, (Ser4Gly)n and (AlaAlaProAla)n (see, SEQ ID NO: 319) in which n is 1 to 4, such as 1, 2, 3 or 4, such as:

(1) Gly4Ser with NocI ends SEQ ID NO. 315
CCATGGGCGG CGGCGGCTCT GCCATGG
(2) (Gly4Ser)2 with NcoI ends SEQ ID NO. 316
CCATGGGCGG CGGCGGCTCT GGCGGCGGCG GCTCTGCCAT GG
(3) (Ser4Gly)4 with NcoI ends SEQ ID NO. 317
CCATGGCCTC GTCGTCGTCG GGCTCGTCGT CGTCGGGCTC
GTCGTCGTCG GGCTCGTCGT CGTCGGGCGC CATGG
(4) (Ser4Gly)2 with NcoI ends SEQ ID NO. 318
CCATGGCCTC GTCGTCGTCG GGCTCGTCGT CGTCGGGCGC CATGG
(5) (AlaAlaProAla)n, where n is 1 to 4, such as 2
or 3 (see, SEQ ID NO.:319)

[0425] c. Heterobifunctional Cross-Linking Reagents

[0426] Numerous heterobifunctional cross-linking reagents that are used to form covalent bonds between amino groups and thiol groups and to introduce thiol groups into proteins, are known to those of skill in this art (see, e.g., the PIERCE CATALOG, ImmunoTechnology Catalog & Handbook, 1992-1993, which describes the preparation of and use of such reagents and provides a commercial source for such reagents; see, also, e.g., Cumber et al. (1992) Bioconjugate Chem. 3:397-401; Thorpe et al. (1987) Cancer Res. 47:5924-5931; Gordon et al. (1987) Proc. Natl. Acad Sci. 84:308-312; Walden et al. (1986) J. Mol. Cell Immunol. 2:191-197; Carlsson et al. (1978) Biochem. J. 173: 723-737; Mahan et al. (1987) Anal. Biochem. 162:163-170; Wawryznaczak et al. (1992) Br. J. Cancer 66:361-366; Fattom et al. (1992) Infection & Immun. 60:584-589). These reagents may be used to form covalent bonds between the N-terminal portion and C-terminus intron-encoded portion or between each of those portions and a linker. These reagents include, but are not limited to: N-succinimidyl-3-(2-pyridyldithio)propionate (SPDP; disulfide linker); sulfosuccinimidyl 6-[3-(2-pyridyldithio)propion [symbol] amido]hexanoate (sulfo-LC-SPDP); succinimidyloxycarbonyl-α-methyl benzyl thiosulfate (SMBT, hindered disulfate linker); succinimidyl 6-[3-(2-pyridyldithio)propionami [symbol] do] [symbol] hexanoate (LC-SPDP); sulfosuccinimidyl 4-(N-maleimidomethyl)cyclohexane-1-carboxylate (sulfo-SMCC); succinimi [symbol] dyl 3-(2-pyridyldithio)butyrate (SPDB; hindered disulfide bond linker); sulfosuccinimidyl 2-(7-azido-4-methylcoumarin-3-acetamide)ethyl-1,3′-dithiopropionate (SAED); sulfo-succinimidyl 7-azido-4-methylcoumarin-3-acetate (SAMCA); sulfosuccinimidyl-6-[alpha-methyl-alpha-(2-pyridyldithio)toluamido]-hexanoate (sulfo-LC-SMPT); 1,4-di-[3′-(2′-pyridyldithio)propion-amido]butane (DPDPB); 4-succinimidyloxycarbonyl-α-methyl-α-(2-pyridylthio)toluene (SMPT, hindered disulfate linker); sulfosuccinimidyl-6-[α-methyl-α-(2-pyrimiyldithio)toluamido]hexanoate (sulfo-LC-SMPT); m-maleimidobenzoyl-N-hydroxy-succinimide ester (MBS); m-maleimidobenzoyl-N-hydroxysulfo-succinimide ester (sulfo-MBS); N-succinimidyl(4-iodoacetyl)aminobenzoate (SIAB; thioether linker); sulfosuccinimidyl-(4-iodoacetyl)amino benzoate (sulfo-SIAB); succinimidyl-4-(p-maleimi-dophenyl)butyrate (SMPB); sulfosuccinimidyl4-(p-maleimido-phenyl)butyrate (sulfo-SMPB); azidobenzoyl hydrazide (ABH). These linkers, for example, can be used in combination with peptide linkers, such as those that increase flexibility or solubility or that provide for or eliminate steric hindrance. Any other linkers known to those of skill in the art for linking a polypeptide molecule to another molecule can be employed. General properties are such that the resulting molecule is biocompatible (for administration to animals, including humans) and such that the resulting molecule modulates the activity of a CSR.

[0427] 4. Expression Systems

[0428] CSR isoforms, including natural and combinatorial intron fusion proteins, can be produced by any method known to those of skill in the art including in vivo and in vitro methods. CSR isoforms can be expressed in any organism suitable to produce the required amounts and forms of CSR isoforms needed for administration and treatment. Expression hosts include prokaryotic and eukaryotic organisms such as E. coli, yeast, plants, insect cells, mammalian cells, including human cell lines and transgenic animals. Expression hosts can differ in their protein production levels as well as the types of post-translational modifications that are present on the expressed proteins. The choice of expression host can be made based on these and other factors, such as regulatory and safety considerations, production costs and the need and methods for purification.

[0429] Many expression vectors are available and known to those of skill in the art and can be used for expression of CSR isoforms. The choice of expression vector will be influenced by the choice of host expression system. In general, expression vectors can include transcriptional promoters and optionally enhancers, translational signals, and transcriptional and translational termination signals. Expression vectors that are used for stable transformation typically have a selectable marker which allows selection and maintenance of the transformed cells. In some cases, an origin of replication can be used to amplify the copy number of the vector.

[0430] CSR isoforms also can be utilized or expressed as protein fusions. For example, an isoform fusion can be generated to add additional functionality to an isoform. Examples of isoform fusion proteins include, but are not limited to, fusions of a signal sequence, a tag such as for localization, e.g. a his₆ tag or a myc tag, or a tag for purification, for example, a GST fusion, and a sequence for directing protein secretion and/or membrane association.

[0431] a. Prokaryotic Expression

[0432] Prokaryotes, especially E. coli, provide a system for producing large amounts of proteins such as CSR isoforms. Transformation of E. coli is a simple and rapid technique well known to those of skill in the art. Expression vectors for E. coli can contain inducible promoters, such promoters are useful for inducing high levels of protein expression and for expressing proteins that exhibit some toxicity to the host cells. Examples of inducible promoters include the lac promoter, the trp promoter, the hybrid tac promoter, the T7 and SP6 RNA promoters and the temperature regulated λPL promoter.

[0433] Isoforms can be expressed in the cytoplasmic environment of E. coli. The cytoplasm is a reducing environment and for some molecules, this can result in the formation of insoluble inclusion bodies. Reducing agents such as dithiothreotol and β-mercaptoethanol and denaturants, such as guanidine-HCl and urea can be used to resolubilize the proteins. An alternative approach is the expression of CSR isoforms in the periplasmic space of bacteria which provides an oxidizing environment and chaperonin-like and disulfide isomerases and can lead to the production of soluble protein. Typically, a leader sequence is fused to the protein to be expressed which directs the protein to the periplasm. The leader is then removed by signal peptidases inside the periplasm. Examples of periplasmic-targeting leader sequences include the pe1B leader from the pectate lyase gene and the leader derived from the alkaline phosphatase gene. In some cases, periplasmic expression allows leakage of the expressed protein into the culture medium. The secretion of proteins allows quick and simple purification from the culture supernatant. Proteins that are not secreted can be obtained from the periplasm by osmotic lysis. Similar to cytoplasmic expression, in some cases proteins can become insoluble and denaturants and reducing agents can be used to facilitate solubilization and refolding. Temperature of induction and growth also can influence expression levels and solubility, typically temperatures between 25° C. and 37° C. are used. Typically, bacteria produce aglycosylated proteins. Thus, if proteins require glycosylation for function, glycosylation can be added in vitro after purification from host cells.

[0434] b. Yeast

[0435] Yeasts such as Saccharomyces cerevisae, Schizosaccharomyces pombe, Yarrowia lipolytica, Kluyveromyces lactis and Pichia pastoris are well known yeast expression hosts that can be used for production of CSR isoforms. Yeast can be transformed with episomal replicating vectors or by stable chromosomal integration by homologous recombination. Typically, inducible promoters are used to regulate gene expression. Examples of such promoters include GAL1, GAL7 and GAL5 and metallothionein promoters, such as CUP1, AOX1 or other Pichia or other yeast promoter. Expression vectors often include a selectable marker such as LEU2, TRP1, HIS3 and URA3 for selection and maintenance of the transformed DNA. Proteins expressed in yeast are often soluble. Co-expression with chaperonins such as Bip and protein disulfide isomerase can improve expression levels and solubility. Additionally, proteins expressed in yeast can be directed for secretion using secretion signal peptide fusions such as the yeast mating type alpha-factor secretion signal from Saccharomyces cerevisae and fusions with yeast cell surface proteins such as the Aga2p mating adhesion receptor or the Arxula adeninivorans glucoamylase. A protease cleavage site such as for the Kex-2 protease, can be engineered to remove the fused sequences from the expressed polypeptides as they exit the secretion pathway. Yeast also is capable of glycosylation at Asn-X-Ser/Thr motifs.

[0436] c. Insect Cells

[0437] Insect cells, particularly using baculovirus expression, are useful for expressing polypeptides such as CSR isoforms. Insect cells express high levels of protein and are capable of most of the post-translational modifications used by higher eukaryotes. Baculovirus have a restrictive host range which improves the safety and reduces regulatory concerns of eukaryotic expression. Typical expression vectors use a promoter for high level expression such as the polyhedrin promoter of baculovirus. Commonly used baculovirus systems include the baculoviruses such as Autographa californica nuclear polyhedrosis virus (AcNPV), and the bombyx mori nuclear polyhedrosis virus (BmNPV) and an insect cell line such as Sf9 derived from Spodoptera frugiperda, Pseudaletia unipuncta (A7S) and Danaus plexippus (DpN1). For high-level expression, the nucleotide sequence of the molecule to be expressed is fused immediately downstream of the polyhedrin initiation codon of the virus. Mammalian secretion signals are accurately processed in insect cells and can be used to secrete the expressed protein into the culture medium. In addition, the cell lines Pseudaletia unipuncta (A7S) and Danaus plexippus (DpN1) produce proteins with glycosylation patterns similar to mammalian cell systems.

[0438] An alternative expression system in insect cells is the use of stably transformed cells. Cell lines such as the Schnieder 2 (S2) and Kc cells (Drosophila melanogaster) and C7 cells (Aedes albopictus) can be used for expression. The Drosophila metallothionein promoter can be used to induce high levels of expression in the presence of heavy metal induction with cadmium or copper. Expression vectors are typically maintained by the use of selectable markers such as neomycin and hygromycin.

[0439] d. Mammalian Cells

[0440] Mammalian expression systems can be used to express CSR isoforms. Expression constructs can be transferred to mammalian cells by viral infection such as adenovirus or by direct DNA transfer such as liposomes, calcium phosphate, DEAE-dextran and by physical means such as electroporation and microinjection. Expression vectors for mammalian cells typically include an mRNA cap site, a TATA box, a translational initiation sequence (Kozak consensus sequence) and polyadenylation elements. Such vectors often include transcriptional promoter-enhancers for high-level expression, for example the SV40 promoter-enhancer, the human cytomegalovirus (CMV) promoter and the long terminal repeat of Rous sarcoma virus (RSV). These promoter-enhancers are active in many cell types. Tissue and cell-type promoters and enhancer regions also can be used for expression. Exemplary promoter/enhancer regions include, but are not limited to, those from genes such as elastase I, insulin, immunoglobulin, mouse mammary tumor virus, albumin, alpha fetoprotein, alpha 1 antitrypsin, beta globin, myelin basic protein, myosin light chain 2, and gonadotropic releasing hormone gene control. Selectable markers can be used to select for and maintain cells with the expression construct. Examples of selectable marker genes include, but are not limited to, hygromycin B phosphotransferase, adenosine deaminase, xanthine-guanine phosphoribosyl transferase, aminoglycoside phosphotransferase, dihydrofolate reductase and thymidine kinase. Fusion with cell surface signaling molecules such as TCR-ξ and Fc_{ε}RI-γ can direct expression of the proteins in an active state on the cell surface.

[0441] Many cell lines are available for mammalian expression including mouse, rat human, monkey, chicken and hamster cells. Exemplary cell lines include but are not limited to CHO, Balb/3T3, HeLa, MT2, mouse NS0 (nonsecreting) and other myeloma cell lines, hybridoma and heterohybridoma cell lines, lymphocytes, fibroblasts, Sp2/0, COS, NIH3T3, HEK293, 293S, 2B8, and HKB cells. Cell lines also are available that are adapted to serum-free media which facilitates purification of secreted proteins from the cell culture media. One such example is the serum free EBNA-1 cell line (Pham et al., (2003) Biotechnol. Bioeng. 84:332-42.)

[0442] e. Plants

[0443] Transgenic plant cells and plants can be used to express CSR isoforms. Expression constructs are typically transferred to plants using direct DNA transfer such as microprojectile bombardment and PEG-mediated transfer into protoplasts, and with agrobacterium-mediated transformation. Expression vectors can include promoter and enhancer sequences, transcriptional termination elements and translational control elements. Expression vectors and transformation techniques are usually divided between dicot hosts, such as Arabidopsis and tobacco, and monocot hosts, such as corn and rice. Examples of plant promoters used for expression include the cauliflower mosaic virus promoter, the nopaline syntase promoter, the ribose bisphosphate carboxylase promoter and the ubiquitin and UBQ3 promoters. Selectable markers such as hygromycin, phosphomannose isomerase and neomycin phosphotransferase are often used to facilitate selection and maintenance of transformed cells. Transformed plant cells can be maintained in culture as cells, aggregates (callus tissue) or regenerated into whole plants. Transgenic plant cells also can include algae engineered to produce CSR isoforms (see for example, Mayfield et al. (2003) PNAS 100:438-442). Because plants have different glycosylation patterns than mammalian cells, this can influence the choice of CSR isoforms produced in these hosts.

[0444] 5. Engineered CSR Isoforms

[0445] CSR isoforms can be designed and produced with one or more modified properties. These properties include but are not limited to increased protein stability, such as an increased protein half-life, increased thermal tolerance and/or resistance to one or more proteases. For example, a CSR isoform can be modified to increase protein stability in vitro and/or in vivo. In vivo stability can include protein stability under particular administration conditions such as stability in blood, saliva, and/or digestive fluids.

[0446] a. Modified Proteins

[0447] CSR isoforms can be modified using any methods known in the art for modification of proteins. Such methods include site-directed and random mutagenesis. Non-natural amino acids and/or non-natural covalent bonds between amino acids of the polypeptide can be introduced into a CSR isoform to increase protein stability. In such modified CSR isoforms, the biological function of the isoform can remain unchanged compared to the unmodified isoform. Assays such as the assays for biological function provided herein and known in the art can be used to assess the biological function of a modified CSR isoform

[0448] b. Peptidomimetic Isoforms.

[0449] Also provided are “peptidomimetic” isoforms in which one or more bonds in the peptide backbone (or other bond(s)) is (are) replaced by a bioisotere or other bond such that the resulting polypeptide peptidomimetic has improved properties, such as resistance to proteases, compared to the unmodified form.

### H. Assays to Assess or Monitor Isoform Activities or Affects on CSR Activities

[0450] CSR isoforms can exhibit alterations in structure or in one more activities compared to a full-length, wildtype or predominant form of a receptor. In addition, the CSR isoforms can alter (modulate) the activity of a CSR. All such isoforms are candidate therapeutics.

[0451] Where the isoforms exhibits a difference in an activity, in vitro and in vivo assays can be used to monitor or screen CSR isoforms. In vitro and in vivo assays also can be used to screen CSR isoforms to identify or select those that modulate the activity of a particular receptor or pathway. Such assays are well known to those of skill in the art. One of skill in the art can test a particular isoform for interaction with a CSR or a CSR ligand and/or test to assess any change in activity compared to a CSR. Some are exemplified herein.

[0452] Exemplary in vitro and in vivo assays are provided herein for comparison of an activity of an RTK isoform to an activity of a wildtype or predominant form of an RTK. Many of the assays are applicable to other CSRs and CSR isoforms. In addition, numerous assays, such as assays for kinase activities and cell proliferation activities of CSRs are known to one of skill in the art. Assays for activities of RTK isoforms and RTKs include, but are not limited to, kinase assays, homodimerization and heterodimerization assays, protein:protein interaction assays, structural assays, cell signaling assays and in vivo phenotyping assays. Assays also include employing animal models, including disease models in which an activity can be observed and/or measured or otherwise assessed. Dose response curves of a CSR isoform in such assays can be used to assess modulation of biological activities and as well as to determine therapeutically effective amounts of a CSR isoform for administration. Assays for RTK isoforms and RTKs include, but are not limited to, kinase assays, homodimerization and heterodimerization assays, protein:protein interaction assays, structural assays, cell signaling assays and in vivo phenotyping assays. Assays for TNFRs include, but are not limited, trimerization assays, localization assays such as membrane localization assays, protein:protein interaction assays, structural assays, cell signaling assays and in vivo phenotyping assays. Exemplary assays are described below.

[0453] 1. Kinase Assays

[0454] Kinase activity can be detected and/or measured directly and indirectly. For example, antibodies against phosphotyrosine can be used to detect phosphorylation of an RTK, RTK isoform, an RTK:RTK isoform complex and phosphorylation of other proteins and signaling molecules. For example, activation of tyrosine kinase activity of an RTK can be measured in the presence of a ligand for an RTK. Transphosphorylation can be detected by anti-phosphotyrosine antibodies. Transphosphorylation can be measured and/or detected in the presence and absence of an RTK isoform, thus measuring the ability of an RTK isoform to modulate the transphosphorylation of an RTK. Briefly, cells expressing an RTK isoform or that have been exposed to an RTK isoform, are treated with ligand. Cells are lysed and protein extracts (whole cell extracts or fractionated extracts) are loaded onto a polyacrylamide gel, separated by electrophoresis and transferred to membrane, such as used for western blotting. Immunoprecipitation with anti-RTK antibodies also can be used to fractionate and isolate RTK proteins before performing gel electrophoresis and western blotting. The membranes can be probed with anti-phosphotyrosine antibodies to detect phosphorylation as well as probed with anti-RTK antibodies to detect total RTK protein. Control cells, such as cells not expressing RTK isoform and cells not exposed to ligand can be subjected to the same procedures for comparison.

[0455] Tyrosine phosphorylation also can be measured directly, such as by mass spectroscopy. For example, the effect of an RTK isoform on the phosphorylation state of an RTK can be measured, such as by treating intact cells with various concentrations of an RTK isoform and measuring the effect on activation of an RTK. The RTK can be isolated by immunoprecipitation and trypsinized to produce peptide fragments for analysis by mass spectroscopy. Peptide mass spectroscopy is a well-established method for quantitatively determining the extent of tyrosine phosphorylation for proteins; phosphorylation of tyrosine increases the mass of the peptide ion containing the phosphotyrosine, and this peptide is readily separated from the non-phosphorylated peptide by mass spectroscopy.

[0456] For example, tyrosine-1139 and tyrosine-1248 are known to be autophosphorylated in the ErbB2 RTK. Trypsinized peptides can be empirically determined or predicted based on polypeptide, for example by using ExPASy-PeptideMass program. The extent of phosphorylation of tyrosine-1139 and tyrosine-1248 can be determined from the mass spectroscopy data of peptides containing these tyrosines. Such assays can be used to assess the extent of auto-phosphorylation of an RTK isoform and the ability of an RTK isoform to transphosphorylate an RTK.

[0457] 2. Complexation

[0458] Complexation, such as dimerization of RTKs and RTK isoforms and trimerization of TNFRs and TNFR isoforms, can be detected and/or measured. For example, isolated polypeptides can be mixed together, subjected to gel electrophoresis and western blotting. CSRs and/or CSR isoforms also can be added to cells and cell extracts, such as whole cell or fractionated extracts, and can be subjected to gel electrophoresis and western blotting. Antibodies recognizing the polypeptides can be used to detect the presence of monomers, dimers and other complexed forms. Alternatively, labeled CSRs and/or labeled CSR isoforms can be detected in the assays.

[0459] For example, such assays can be used to compare homodimerization of an RTK or heterodimerization of two or more RTKs in the presence and absence of an RTK isoform. Assays also can be performed to assess homodimerization of an RTK isoform and/or its ability to heterodimerize with an RTK. For example an ErbB2 RTK isoform can be assessed for its ability to heterodimerize with ErbB2, ErbB3 and ErbB4. Additionally, an ErbB2 RTK isoform can be assessed for its ability to modulate the ability of ErbB2 to homodimerize with itself.

[0460] 3. Ligand Binding

[0461] Generally, CSRs bind to one or more ligands. Ligand binding modulates the activity of the receptor and thus modulates, for example, signaling within a signal transduction pathway. Ligand binding of a CSR isoform and ligand binding of a CSR in the presence of a CSR isoform can be measured. For example, labeled ligand such as radiolabeled ligand can be added to purified or partially purified CSR in the presence and absence (control) of a CSR isoform. Immunoprecipitation and measurement of radioactivity can be used to quantify the amount of ligand bound to a CSR in the presence and absence of a CSR isoform. A CSR isoform also can be assessed for ligand binding such as by incubating a CSR isoform with labeled ligand and determining the amount of labeled ligand bound by a CSR isoform, for example, compared to an amount bound by a wildtype or predominant form of a corresponding CSR.

[0462] 4. Cell Proliferation Assays

[0463] A number of RTKs, for example VEGFR, are involved in cell proliferation. Effects of an RTK isoform on cell proliferation can be measured. For example, ligand can be added to cells expressing an RTK. An RTK isoform can be added to such cells before, concurrently or after ligand addition and effects on cell proliferation measured. Alternatively an RTK isoform can be expressed in such cell models, for example using an adenovirus vector. For example, a VEGFR isoform is added to endothelial cells expressing VEGFR. Following isoform addition, VEGF ligand is added and the cells are incubated at standard growth temperature (e.g. 37° C.) for several days. Cells are trypsinized, stained with trypan blue and viable cells are counted. Cells not exposed to VEGFR isoform and/or ligand are used as controls for comparison. Other suitable controls can be employed.

[0464] 5. Cell Disease Model Assays

[0465] Cells from a disease or condition or that can be modulated to mimic a disease or condition can be used to measure/and or detect the effect of an CSR isoform. Numerous animal and in vitro disease models are known to those of skill in the art. For example, a CSR isoform is added or expressed in cells and a phenotype is measured or detected in comparison to cells not exposed to or not expressing a CSR isoform. Such assays can be used to measure effects including effects on cell proliferation, metastasis, inflammation, angiogenesis, pathogen infection and bone resorption.

[0466] For example, effects of a MET isoform can be measured using such assays. A liver cell model such as HepG2 liver cells can be used to monitor the infectivity of malaria in culture by sporozoites. An RTK isoform such as a MET isoform can be added to the cells and/or expressed in the cells. Infection of such cells with malaria sporozoites is then measured, such as by staining and counting the EEFs (exoerythrocytic forms) of the sporozoite that are produced as a result of infection Carrolo et al. (2003) Nat Med 9(11):1363-1369. Effects of an RTK isoform can be assessed by comparing results to cells not exposed or expressing an RTK isoform and/or uninfected cells.

[0467] Effects of a CSR isoform also can be measured in angiogenesis. For example, tubule formation by endothelial cells such as human umbilical vein endothelial cells (HUVEC) in vitro can be used as an assay to measure angiogenesis and effects on angiogenesis. Addition of varying amounts of a CSR isoform to an in vitro angiogenesis assay is a method suitable for screening the effectiveness of a CSR isoform as a modulator of angiogenesis.

[0468] Bone resorption can be measured in cell culture to measure effectiveness of an RTK-isoform, such as by using osteoclast cultures. Osteoclasts are highly differentiated cells of hematopoietic origin that resorb bone in the organism, and are able to resorb bone from bone slices in vitro. Methods for cell culture of osteoclasts and quantitative techniques for measuring bone resorption in osteoclast cell culture have been described in the art. For example, mononuclear cells can be isolated from human peripheral blood and cultured. Addition and/or expression of a CSR isoform can be used to assess effects on osteoclast formation such as by measuring multinucleated cells positive for tartrate-resistant acid phosphatase and resorbed area and collagen fragments released from bone slices. Dose response curves can be used to determine therapeutically effective amounts of a CSR isoform necessary to modulate bone resorption.

[0469] 6. Animal Models

[0470] Animal models can be used to assess the effect of a CSR isoform. In one example, animal models of disease can be studied to determine if introduction of a CSR isoform affects the disease. For example, CSR isoform effects on tumor formation including cancer cell proliferation, migration and invasiveness can be measured. In one such assay, cancer cells such as ovarian cancer cells are infected with an adenovirus expressing a CSR isoform. After a culturing period in vitro, cells are trypsinized, suspended in a suitable buffer and injected into mice (e.g., subcutaneously into flanks and shoulders of model mice such as Balb/c nude mice). Tumor growth is monitored over time. Control cells, not expressing a CSR isoform, can be injected into mice for comparison. Similar assays can be performed with other cell types and animal models, for example, NIH3T3 cells, murine lung carcinoma (LLC) cells, primary Pancreatic Adenocarcinoma (PANC-1) cells, TAKA-1 pancreatic ductal cells, and C57BL/6 mice and SCID mice. In a further example, effects of CSR isoforms on ocular disorders can be assessed using assays such as a corneal micropocket assay. Briefly, mice receive cells expressing a CSR isoform (or control) by injection 2-3 days before the assay. Subsequently, the mice are anesthetized, and pellets of a ligand are implanted into the corneal micropocket of the eyes. Neovascularization is then measured, for example, 5 days following implantation. The effect of a CSR isoform on angiogenesis and eye phenotype compared to a control is then assessed. In an additional example, effects of a CSR isoform in a model of collagen type II-induced arthritis (CIA) can be assessed by intraperitoneal injection of SCID mice with splenocytes from DBA/1 mice that have been transduced with a retroviral vector containing the cDNA of a CSR isoform or unmodified splenocytes. Mice that receive unmodified splenocytes develop arthritis within 11-13 days and can be used as a reference control to determine effects of CSR isoform-expressing splenocytes on the development of arthritis as assessed, for example, by clinical, histological, or immunological (i.e. antibody levels) parameters of arthritis.

[0471] Effects of CSR isoforms on animal models of disease additionally can be assessed by the administration of purified or recombinant forms of a CSR isoform. For example, wound healing can be assessed in a model of impaired wound healing utilizing genetically diabetic db+/db+ mice whereby full-thickness excisional wounds are created on the backs of diabetic mice. Following treatment with a CSR isoform, either topically or systemically, wound healing can be assessed by analyzing for wound closure, inflammatory cell infiltration at the site of the wound, and expression of inflammatory cytokines. The effects of CSR isoforms on wound healing can be assessed over time and effects can be compared to mice that receive a control treatment, for example a vehicle only control. In a further example, a recombinant CSR isoform can be administered in a model of pulmonary fibrosis induced by bleomycin or silica to determine if lung fibrosis is reduced as assessed, for example, by analysis of histological sections for lung damage and by assaying for effects on bleomycin/silica induced increases of lung hydroxyproline content.

[0472] Animals deficient in a CSR isoform also can be used to monitor the biological activity of a CSR isoform. For example an isoform-specific disruption can made by creating a targeted construct whereby upstream from an IRES-LacZ cassette, translational stop codons are introduced within the appropriate reading frame to ensure that the receptor protein terminates early. Alternatively, a LoxP/Cre recombination strategy can be used. Following confirmation of the targeted disruption, the consequences of a deficiency in a CSR isoform can be established by analyzing the phenotype of the deficient mice compared to wildtype mice including the development of various organs such as, for example, lung, limbs, eyelids, anterior pituitary gland, and pancreas. In addition, by histology or isolation of specific cell populations, other parameters, such as apoptosis or cell proliferation, can be assessed to determine if there is a difference between animals or isolated cells lacking the CSR isoform compared to wildtype CSR. Components of signaling cascades and expression of downstream genes also can be assessed to determine if the absence of a CSR isoform affects receptor signaling and gene expression.

### I. Preparation, Formulation and Administration of CSR Isoforms and CSR Isoform Compositions

[0473] CSR isoforms and CSR isoform compositions, including RTK and TNFR isoforms and RTK and TNFR isoform compositions, can be formulated for administration by any route known to those of skill in the art including intramuscular, intravenous, intradermal, intraperitoneal injection, subcutaneous, epidural, nasal oral, rectal, topical, inhalational, buccal (e.g., sublingual), and transdermal administration or any route. CSR isoforms can be administered by any convenient route, for example by infusion or bolus injection, by absorption through epithelial or mucocutaneous linings (e.g., oral mucosa, rectal and intestinal mucosa, etc.) and can be administered with other biologically active agents, either sequentially, intermittently or in the same composition. Administration can be local, topical or systemic depending upon the locus of treatment. Local administration to an area in need of treatment can be achieved by, for example, but not limited to, local infusion during surgery, topical application, e.g., in conjunction with a wound dressing after surgery, by injection, by means of a catheter, by means of a suppository, or by means of an implant. Administration also can include controlled release systems including controlled release formulations and device controlled release, such as by means of a pump. The most suitable route in any given case will depend on the nature and severity of the disease or condition being treated and on the nature of the particular composition which is used.

[0474] Various delivery systems are known and can be used to administer CSR isoforms, such as but not limited to, encapsulation in liposomes, microparticles, microcapsules, recombinant cells capable of expressing the compound, receptor mediated endocytosis, and delivery of nucleic acid molecules encoding CSR isoforms such as retrovirus delivery systems.

[0475] Pharmaceutical compositions containing CSR isoforms can be prepared. Generally, pharmaceutically acceptable compositions are prepared in view of approvals for a regulatory agency or other prepared in accordance with generally recognized pharmacopeia for use in animals and in humans. Pharmaceutical compositions can include carriers such as a diluent, adjuvant, excipient, or vehicle with which an isoform is administered. Such pharmaceutical carriers can be sterile liquids, such as water and oils, including those of petroleum, animal, vegetable or synthetic origin, such as peanut oil, soybean oil, mineral oil, and sesame oil. Water is a typical carrier when the pharmaceutical composition is administered intravenously. Saline solutions and aqueous dextrose and glycerol solutions also can be employed as liquid carriers, particularly for injectable solutions. Compositions can contain along with an active ingredient: a diluent such as lactose, sucrose, dicalcium phosphate, or carboxymethylcellulose; a lubricant, such as magnesium stearate, calcium stearate and talc; and a binder such as starch, natural gums, such as gum acaciagelatin, glucose, molasses, polyinylpyrrolidine, celluloses and derivatives thereof, povidone, crospovidones and other such binders known to those of skill in the art. Suitable pharmaceutical excipients include starch, glucose, lactose, sucrose, gelatin, malt, rice, flour, chalk, silica gel, sodium stearate, glycerol monostearate, talc, sodium chloride, dried skim milk, glycerol, propylene, glycol, water, and ethanol. A composition, if desired, also can contain minor amounts of wetting or emulsifying agents, or pH buffering agents, for example, acetate, sodium citrate, cyclodextrine derivatives, sorbitan monolaurate, triethanolamine sodium acetate, triethanolamine oleate, and other such agents. These compositions can take the form of solutions, suspensions, emulsion, tablets, pills, capsules, powders, and sustained release formulations. A composition can be formulated as a suppository, with traditional binders and carriers such as triglycerides. Oral formulation can include standard carriers such as pharmaceutical grades of mannitol, lactose, starch, magnesium stearate, sodium saccharine, cellulose, magnesium carbonate, and other such agents. Examples of suitable pharmaceutical carriers are described in “Remington's Pharmaceutical Sciences” by E. W. Martin. Such compositions will contain a therapeutically effective amount of the compound, generally in purified form, together with a suitable amount of carrier so as to provide the form for proper administration to the patient. The formulation should suit the mode of administration.

[0476] Formulations are provided for administration to humans and animals in unit dosage forms, such as tablets, capsules, pills, powders, granules, sterile parenteral solutions or suspensions, and oral solutions or suspensions, and oil water emulsions containing suitable quantities of the compounds or pharmaceutically acceptable derivatives thereof. Pharmaceutically therapeutically active compounds and derivatives thereof are typically formulated and administered in unit dosage forms or multiple dosage forms. Each unit dose contains a predetermined quantity of therapeutically active compound sufficient to produce the desired therapeutic effect, in association with the required pharmaceutical carrier, vehicle or diluent. Examples of unit dose forms include ampoules and syringes and individually packaged tablets or capsules. Unit dose forms can be administered in fractions or multiples thereof. A multiple dose form is a plurality of identical unit dosage forms packaged in a single container to be administered in segregated unit dose form. Examples of multiple dose forms include vials, bottles of tablets or capsules or bottles of pints or gallons. Hence, multiple dose form is a multiple of unit doses that are not segregated in packaging.

[0477] Dosage forms or compositions containing active ingredient in the range of 0.005% to 100% with the balance made up from non-toxic carrier can be prepared. For oral administration, pharmaceutical compositions can take the form of, for example, tablets or capsules prepared by conventional means with pharmaceutically acceptable excipients such as binding agents (e.g., pregelatinized maize starch, polyvinyl pyrrolidone or hydroxypropyl methylcellulose); fillers (e.g., lactose, microcrystalline cellulose or calcium hydrogen phosphate); lubricants (e.g., magnesium stearate, talc or silica); disintegrants (e.g., potato starch or sodium starch glycolate); or wetting agents (e.g., sodium lauryl sulphate). The tablets can be coated by methods well-known in the art.

[0478] Pharmaceutical preparation also can be in liquid form, for example, solutions, syrups or suspensions, or can be presented as a drug product for reconstitution with water or other suitable vehicle before use. Such liquid preparations can be prepared by conventional means with pharmaceutically acceptable additives such as suspending agents (e.g., sorbitol syrup, cellulose derivatives or hydrogenated edible fats); emulsifying agents (e.g., lecithin or acacia); non-aqueous vehicles (e.g., almond oil, oily esters, or fractionated vegetable oils); and preservatives (e.g., methyl or propyl-p-hydroxybenzoates or sorbic acid).

[0479] Formulations suitable for rectal administration can be provided as unit dose suppositories. These can be prepared by admixing the active compound with one or more conventional solid carriers, for example, cocoa butter, and then shaping the resulting mixture.

[0480] Formulations suitable for topical application to the skin or to the eye include ointments, creams, lotions, pastes, gels, sprays, aerosols and oils. Exemplary carriers include Vaseline, lanoline, polyethylene glycols, alcohols, and combinations of two or more thereof. The topical formulations also can contain 0.05 to 15, 20, 25 percent by weight of thickeners selected from among hydroxypropyl methyl cellulose, methyl cellulose, polyvinylpyrrolidone, polyvinyl alcohol, poly(alkylene glycols), poly/hydroxyalkyl, (meth)acrylates or poly(meth)acrylamides. A topical formulation is often applied by instillation or as an ointment into the conjunctival sac. It also can be used for irrigation or lubrication of the eye, facial sinuses, and external auditory meatus. It also can be injected into the anterior eye chamber and other places. A topical formulation in the liquid state can be also present in a hydrophilic three-dimensional polymer matrix in the form of a strip or contact lens, from which the active components are released.

[0481] For administration by inhalation, the compounds for use herein can be delivered in the form of an aerosol spray presentation from pressurized packs or a nebulizer, with the use of a suitable propellant, e.g., dichlorodifluoromethane, trichlorofluoromethane, dichlorotetrafluoroethane, carbon dioxide or other suitable gas. In the case of a pressurized aerosol, the dosage unit can be determined by providing a valve to deliver a metered amount. Capsules and cartridges of, e.g., gelatin, for use in an inhaler or insufflator can be formulated containing a powder mix of the compound and a suitable powder base such as lactose or starch.

[0482] Formulations suitable for buccal (sublingual) administration include, for example, lozenges containing the active compound in a flavored base, usually sucrose and acacia or tragacanth; and pastilles containing the compound in an inert base such as gelatin and glycerin or sucrose and acacia.

[0483] Pharmaceutical compositions of CSR isoforms can be formulated for parenteral administration by injection, e.g., by bolus injection or continuous infusion. Formulations for injection can be presented in unit dosage form, e.g., in ampoules or in multi-dose containers, with an added preservative. The compositions can be suspensions, solutions or emulsions in oily or aqueous vehicles, and can contain formulatory agents such as suspending, stabilizing and/or dispersing agents. Alternatively, the active ingredient can be in powder form for reconstitution with a suitable vehicle, e.g., sterile pyrogen-free water or other solvents, before use.

[0484] Formulations suitable for transdermal administration can be presented as discrete patches adapted to remain in intimate contact with the epidermis of the recipient for a prolonged period of time. Such patches suitably contain the active compound as an optionally buffered aqueous solution of, for example, 0.1 to 0.2M concentration with respect to the active compound. Formulations suitable for transdermal administration also can be delivered by iontophoresis (see, e.g., Pharmaceutical Research 3(6), 318 (1986)) and typically take the form of an optionally buffered aqueous solution of the active compound.

[0485] Pharmaceutical compositions also can be administered by controlled release means and/or delivery devices (see, e.g., in U.S. Pat. Nos. 3,536,809; 3,598,123; 3,630,200; 3,845,770; 3,847,770; 3,916,899; 4,008,719; 4,687,610; 4,769,027; 5,059,595; 5,073,543; 5,120,548; 5,354,566; 5,591,767; 5,639,476; 5,674,533 and 5,733,566).

[0486] In certain embodiments, liposomes and/or nanoparticles may also be employed with CSR isoform administration. Liposomes are formed from phospholipids that are dispersed in an aqueous medium and spontaneously form multilamellar concentric bilayer vesicles (also termed multilamellar vesicles (MLVs). MLVs generally have diameters of from 25 nm to 4 μm. Sonication of MLVs results in the formation of small unilamellar vesicles (SUVs) with diameters in the range of 200 to 500 .ANG., containing an aqueous solution in the core.

[0487] Phospholipids can form a variety of structures other than liposomes when dispersed in water, depending on the molar ratio of lipid to water. At low ratios, the liposomes form. Physical characteristics of liposomes depend on pH, ionic strength and the presence of divalent cations. Liposomes can show low permeability to ionic and polar substances, but at elevated temperatures undergo a phase transition which markedly alters their permeability. The phase transition involves a change from a closely packed, ordered structure, known as the gel state, to a loosely packed, less-ordered structure, known as the fluid state. This occurs at a characteristic phase-transition temperature and results in an increase in permeability to ions, sugars and drugs.

[0488] Liposomes interact with cells via different mechanisms: Endocytosis by phagocytic cells of the reticuloendothelial system such as macrophages and neutrophils; adsorption to the cell surface, either by nonspecific weak hydrophobic or electrostatic forces, or by specific interactions with cell-surface components; fusion with the plasma cell membrane by insertion of the lipid bilayer of the liposome into the plasma membrane, with simultaneous release of liposomal contents into the cytoplasm; and by transfer of liposomal lipids to cellular or subcellular membranes, or vice versa, without any association of the liposome contents. Varying the liposome formulation can alter which mechanism is operative, although more than one may operate at the same time. Nanocapsules can generally entrap compounds in a stable and reproducible way. To avoid side effects due to intracellular polymeric overloading, such ultrafine particles (sized around 0.1 μm) should be designed using polymers able to be degraded in vivo. Biodegradable polyalkyl-cyanoacrylate nanoparticles that meet these requirements are contemplated for use herein, and such particles can be easily made.

[0489] Administration methods can be employed to decrease the exposure of CSR isoforms to degradative processes, such as proteolytic degradation and immunological intervention via antigenic and immunogenic responses. Examples of such methods include local administration at the site of treatment. Pegylation of therapeutics has been reported to increase resistance to proteolysis; increase plasma half-life, and decrease antigenicity and immunogenicity. Examples of pegylation methodologies are known in the art (see for example, Lu and Felix, Int. J. Peptide Protein Res., 43: 127-138, 1994; Lu and Felix, Peptide Res., 6: 142-6, 1993; Felix et al., Int. J. Peptide Res., 46: 253-64, 1995; Benhar et al., J. Biol. Chem., 269: 13398-404, 1994; Brumeanu et al., J Immunol., 154: 3088-95, 1995; see also, Caliceti et al. (2003) Adv. Drug Deliv. Rev. 55(10):1261-77 and Molineux (2003) Pharmacotherapy 23 (8 Pt 2):3S-8S). Pegylation also can be used in the delivery of nucleic acid molecules in vivo. For example, pegylation of adenovirus can increase stability and gene transfer (see, e.g., Cheng et al. (2003) Pharm. Res. 20(9): 1444-51).

[0490] Desirable blood levels can be maintained by a continuous infusion of the active agent as ascertained by plasma levels. It should be noted that the attending physician would know how to and when to terminate, interrupt or adjust therapy to lower dosage due to toxicity, or bone marrow, liver or kidney dysfunctions. Conversely, the attending physician would also know how to and when to adjust treatment to higher levels if the clinical response is not adequate (precluding toxic side effects). administered, for example, by oral, pulmonary, parental (intramuscular, intraperitoneal, intravenous (IV) or subcutaneous injection), inhalation (via a fine powder formulation), transdermal, nasal, vaginal, rectal, or sublingual routes of administration and can be formulated in dosage forms appropriate for each route of administration (see, e.g., International PCT application Nos. WO 93/25221 and WO 94/17784; and European Patent Application 613,683).

[0491] A CSR isoform is included in the pharmaceutically acceptable carrier in an amount sufficient to exert a therapeutically useful effect in the absence of undesirable side effects on the patient treated. Therapeutically effective concentration can be determined empirically by testing the compounds in known in vitro and in vivo systems, such as the assays provided herein.

[0492] The concentration a CSR isoform in the composition will depend on absorption, inactivation and excretion rates of the complex, the physicochemical characteristics of the complex, the dosage schedule, and amount administered as well as other factors known to those of skill in the art. The amount of a CSR isoform to be administered for the treatment of a disease or condition, for example cancer, autoimmune disease and infection can be determined by standard clinical techniques. In addition, in vitro assays and animal models can be employed to help identify optimal dosage ranges. The precise dosage, which can be determined empirically, can depend on the route of administration and the seriousness of the disease. Suitable dosage ranges for administration can range from about 0.01 pg/kg body weight to 1 mg/kg body weight and more typically 0.05 mg/kg to 200 mg/kg CSR isoform: patient weight.

[0493] A CSR isoform can be administered at once, or can be divided into a number of smaller doses to be administered at intervals of time. CSR isoforms can be administered in one or more doses over the course of a treatment time for example over several hours, days, weeks, or months. In some cases, continuous administration is useful. It is understood that the precise dosage and duration of treatment is a function of the disease being treated and can be determined empirically using known testing protocols or by extrapolation from in vivo or in vitro test data. It is to be noted that concentrations and dosage values also can vary with the severity of the condition to be alleviated. It is to be further understood that for any particular subject, specific dosage regimens should be adjusted over time according to the individual need and the professional judgment of the person administering or supervising the administration of the compositions, and that the concentration ranges set forth herein are exemplary only and are not intended to limit the scope or use of compositions and combinations containing them.

### J. In Vivo Expression of CSR Isoforms and Gene Therapy

[0494] CSR isoforms can be delivered to cells and tissues by expression of nucleic acid molecules. CSR isoforms can be administered as nucleic acid molecules encoding a CSR isoform, including ex vivo techniques and direct in vivo expression.

[0495] 1. Delivery of Nucleic Acids

[0496] Nucleic acids can be delivered to cells and tissues by any method known to those of skill in the art.

[0497] a. Vectors—Episomal and Integrating

[0498] Methods for administering CSR isoforms by expression of encoding nucleic acid molecules include administration of recombinant vectors. The vector can be designed to remain episomal, such as by inclusion of an origin of replication or can be designed to integrate into a chromosome in the cell.

[0499] CSR isoforms also can be used in ex vivo gene expression therapy using non-viral vectors. For example, cells can be engineered to express a CSR isoform, such as by integrating a CSR isoform encoding-nucleic acid into a genomic location, either operatively linked to regulatory sequences or such that it is placed operatively linked to regulatory sequences in a genomic location. Such cells then can be administered locally or systemically to a subject, such as a patient in need of treatment.

[0500] Viral vectors, include, for example adenoviruses, herpes viruses, retroviruses and others designed for gene therapy can be employed. The vectors can remain episomal or can integrate into chromosomes of the treated subject. A CSR isoform can be expressed by a virus, which is administered to a subject in need of treatment. Virus vectors suitable for gene therapy include adenovirus, adeno-associated virus, retroviruses, lentiviruses and others noted above. For example, adenovirus expression technology is well-known in the art and adenovirus production and administration methods also are well known. Adenovirus serotypes are available, for example, from the American Type Culture Collection (ATCC, Rockville, Md.). Adenovirus can be used ex vivo, for example, cells are isolated from a patient in need of treatment, and transduced with a CSR isoform-expressing adenovirus vector. After a suitable culturing period, the transduced cells are administered to a subject, locally and/or systemically. Alternatively, CSR isoform-expressing adenovirus particles are isolated and formulated in a pharmaceutically-acceptable carrier for delivery of a therapeutically effective amount to prevent, treat or ameliorate a disease or condition of a subject. Typically, adenovirus particles are delivered at a dose ranging from 1 particle to 1014 particles per kilogram subject weight, generally between 106 or 108 particles to 1012 particles per kilogram subject weight. In some situations it is desirable to provide a nucleic acid source with an agent that targets cells, such as an antibody specific for a cell surface membrane protein or a target cell, or a ligand for a receptor on a target cell.

[0501] A CSR isoform can be expressed by a virus and the virus administered to a subject in need of treatment. Virus vectors suitable for gene therapy include, for example, adenovirus, adeno-associated virus, retroviruses, lentiviruses Adenovirus expression technology is well-known in the art and adenovirus production and administration methods also are well known. Adenovirus serotypes are available, for example, from the American Type Culture Collection (ATCC, Rockville, Md.). Adenovirus can be used ex vivo, for example, cells are isolated from a patient in need of treatment, and transduced with a CSR isoform-expressing adenovirus vector. After a suitable culturing period, the transduced cells are administered to a subject, locally and/or systemically. As another example, CSR isoform-expressing adenovirus particles are isolated and formulated in a pharmaceutically-acceptable carrier for delivery of a therapeutically effective amount to prevent, treat or ameliorate a disease or condition of a subject. Typically, adenovirus particles are delivered at a dose ranging from 1 particle to 1014 particles per kilogram subject weight, generally between 106 or 108 particles to 1012 particles per kilogram subject weight. In some situations it is desirable to provide a nucleic acid source with an agent that targets cells, such as an antibody specific for a cell surface membrane protein or a target cell, or a ligand for a receptor on a target cell. Where liposomes are employed, proteins which bind to a cell surface membrane protein associated with endocytosis may be used for targeting and/or to facilitate uptake, e.g. capsid proteins or fragments thereof tropic for a particular cell type, antibodies for proteins which undergo internalization in cycling, and proteins that target intracellular localization and enhance intracellular half-life.

[0502] b. Artificial Chromosomes and Other Non-Viral Vector Delivery Methods

[0503] CSR isoforms also can be used in ex vivo gene expression therapy using non-viral vectors. For example, cells can be engineered which express a CSR isoform, such as by integrating a CSR isoform sequence into a genomic location, either operatively linked to regulatory sequences or such that it is placed operatively linked to regulatory sequences in a genomic location. Such cells then can be administered locally or systemically to a subject, such as a patient in need of treatment.

[0504] The nucleic acid molecules can be introduced into artificial chromosomes and other non-viral vectors. Artificial chromosomes (see, e.g., U.S. Pat. No. 6,077,697 and PCT International PCT application No. WO 02/097059) can be engineered to encode and express the isoform.

[0505] c. Liposomes and Other Encapsulated Forms and Administration of Cells Containing the Nucleic Acids

[0506] The nucleic acids can be encapsulated in a vehicle, such as a liposome, or introduced into a cells, such as a bacterial cell, particularly an attenuated bacterium or introduced into a viral vector. For example, when liposomes are employed, proteins that bind to a cell surface membrane protein associated with endocytosis can be used for targeting and/or to facilitate uptake, e.g. capsid proteins or fragments thereof tropic for a particular cell type, antibodies for proteins which undergo internalization in cycling, and proteins that target intracellular localization and enhance intracellular half-life.

[0507] 2. In Vitro and Ex Vivo Delivery

[0508] For ex vivo and in vivo methods, nucleic acid molecules encoding the CSR isoform is introduced into cells that are from a suitable donor or the subject to be treated. In vivo expression of a CSR isoform can be linked to expression of additional molecules. For example, expression of a CSR isoform can be linked with expression of a cytotoxic product such as in an engineered virus or expressed in a cytotoxic virus. Such viruses can be targeted to a particular cell type that is a target for a therapeutic effect. The expressed CSR isoform can be used to enhance the cytotoxicity of the virus.

[0509] In vivo expression of a CSR isoform can include operatively linking a CSR isoform encoding nucleic acid molecule to specific regulatory sequences such as a cell-specific or tissue-specific promoter. CSR isoforms also can be expressed from vectors that specifically infect and/or replicate in target cell types and/or tissues. Inducible promoters can be use to selectively regulate CSR isoform expression.

[0510] Cells into which a nucleic acid can be introduced for purposes of therapy encompass any desired, available cell type appropriate for the disease or condition to be treated, including but not limited to epithelial cells, endothelial cells, keratinocytes, fibroblasts, muscle cells, hepatocytes; blood cells such as T lymphocytes, B lymphocytes, monocytes, macrophages, neutrophils, eosinophils, megakaryocytes, granulocytes; various stem or progenitor cells, in particular hematopoietic stem or progenitor cells, e.g., such as stem cells obtained from bone marrow, umbilical cord blood, peripheral blood, fetal liver, and other sources thereof. Tumor cells also can be target cells for in vivo expression of CSR isoforms. Cells used for in vivo expression of an isoform also include cells autologous to the patient. Such cells can be removed from a patient, nucleic acids for expression of a CSR isoform introduced, and then administered to a patient such as by injection or engraftment.

[0511] Techniques suitable for the transfer of nucleic acid into mammalian cells in vitro include the use of liposomes and cationic lipids (e.g., DOTMA, DOPE and DC-Chol), electroporation, microinjection, cell fusion, DEAE-dextran, and calcium phosphate precipitation methods. Methods of DNA delivery can be used to express CSR isoforms in vivo. Such methods include liposome delivery of nucleic acids and naked DNA delivery, including local and systemic delivery such as using electroporation, ultrasound and calcium-phosphate delivery. Other techniques include microinjection, cell fusion, chromosome-mediated gene transfer, microcell-mediated gene transfer and spheroplast fusion.

[0512] For ex vivo treatment, cells from a donor compatible with the subject to be treated or cells from the subject to be treated are removed, the nucleic acid is introduced into these isolated cells and the modified cells are administered to the subject.

[0513] Treatment includes direct administration, such as, for example, encapsulated within porous membranes, which are implanted into the patient (see, e.g. U.S. Pat. Nos. 4,892,538 and 5,283,187). Techniques suitable for the transfer of nucleic acid into mammalian cells in vitro include the use of liposomes and cationic lipids (e.g., DOTMA, DOPE and DC-Chol), electroporation, microinjection, cell fusion, DEAE-dextran, and calcium phosphate precipitation methods. Methods of DNA delivery can be used to express CSR isoforms in vivo. Such methods include liposome delivery of nucleic acids and naked DNA delivery, including local and systemic delivery such as using electroporation, ultrasound and calcium-phosphate delivery. Other techniques include microinjection, cell fusion, chromosome-mediated gene transfer, microcell-mediated gene transfer and spheroplast fusion.

[0514] In vivo expression of a CSR isoform can be linked to expression of additional molecules. For example, expression of a CSR isoform can be linked with expression of a cytotoxic product such as in an engineered virus or expressed in a cytotoxic virus. Such viruses can be targeted to a particular cell type that is a target for a therapeutic effect. The expressed CSR isoform can be used to enhance the cytotoxicity of the virus.

[0515] In vivo expression of a CSR isoform can include operatively linking a CSR isoform encoding nucleic acid molecule to specific regulatory sequences such as a cell-specific or tissue-specific promoter. CSR isoforms also can be expressed from vectors that specifically infect and/or replicate in target cell types and/or tissues. Inducible promoters can selectively regulate CSR isoform expression.

[0516] 3. Systemic, Local and Topical Delivery

[0517] Nucleic acid molecules, as naked nucleic acids or in vectors, artificial chromosomes, liposomes and other vehicles can be administered to the subject by systemic administration, topical, local and other routes of administration. When systemic and in vivo, the nucleic acid molecule or vehicle containing the nucleic acid molecule can be targeted to a cell.

[0518] Administration also can be direct, such as by administration of a vector or cells that typically targets a cell or tissue. For example, tumor cells and proliferating cells can be targeted cells for in vivo expression of CSR isoforms. Cells used for in vivo expression of an isoform also include cells autologous to the patient. Such cells can be removed from a patient, nucleic acids for expression of a CSR isoform introduced, and then administered to a patient such as by injection or engraftment.

### K. CSRs and Angiogenesis

[0519] CSRs participate in pathways involved in a variety of pathways, including those that participate in angiogenesis, cell proliferation, inflammatory responses, and neovascularization among others. Angiogenesis is a process by which new blood vessels are formed. It occurs in healthy individuals, such as during wound healing and in aberrant conditions, such as in tumors. It occurs for example, in a healthy body in would healing and for restoring blood flow to tissues after injury or insult. Angiogenesis is a component of tumorigenesis, which requires the growth of blood cells to feed the growing tumorous mass. In females, angiogenesis also occurs during the monthly reproductive cycle to rebuild the uterus lining, to mature the egg during ovulation and during pregnancy to build the placenta.

[0520] Angiogenesis is controlled through a series of “on” and “off” switches. The primary “on” switches are angiogenesis-stimulating growth factors. The primary “off switches” are angiogenesis inhibitors. When angiogenic growth factors are produced in excess of angiogenesis inhibitors, the balance can be in favor of blood vessel growth. When inhibitors are present in excess of stimulators, angiogenesis is stopped. A healthy body maintains a balance of angiogenesis modulators. A number of angiogenic growth factors are known. These include, for example, angiogenin, angiopoietin-1, Del-1, fibroblast growth factors: acidic (aFGF) and basic (bFGF), follistatin, granulocyte colony-stimulating factor (G-CSF), hepatocyte growth factor (HGF), scatter factor (SF), interleukin-8 (IL-8), leptin, midkine, placental growth factor, platelet-derived endothelial cell growth factor (PD-ECGF), platelet-derived growth factor-BB (PDGF-BB), pleiotrophin (PTN), progranulin, proliferin, transforming growth factor-alpha (TGF-alpha), transforming growth factor-beta (TGF-beta), tumor necrosis factor-alpha (TNF-alpha), and vascular endothelial growth factor (VEGF)/vascular permeability factor (VPF).

[0521] 1. Angiogenesis and Disease

[0522] Cellular receptors for angiogenic factors (positive and negative) can act as points of intervention in multiple disease processes, for example, in diseases and conditions where the balance of angiogenic growth factors has been altered and/or the amount or timing of angiogenesis is altered. For example, in some situations ‘too much’ angiogenesis can be detrimental, such as angiogenesis that supplies blood to tumor foci, in inflammatory responses and other aberrant angiogenic-related conditions. The growth of tumors, or sites of proliferation in chronic inflammation, generally requires the recruitment of neighboring blood vessels and vascular endothelial cells to support their metabolic requirements. This is because the diffusion is limited for oxygen in tissues. Exemplary conditions that require angiogenesis include, but are not limited to solid tumors and hematologic malignancies such as lymphomas, acute leukemia, and multiple myeloma, where increased numbers of blood vessels are observed in the pathologic bone marrow.

[0523] A critical element in the growth of primary tumors and formation of metastatic sites is the angiogenic switch: the ability of the tumor or inflammatory site to promote the formation of new capillaries from preexisting host vessels. The angiogenic switch, as used in this context, refers to disease-associated angiogenesis required for the progression of cancer and inflammatory diseases, such as rheumatoid arthritis. It is a switch that activates a cascade of physiological activities that finally result in the extension of new blood vessels to support the growth of diseased tissue. Stimuli for neo-angiogenesis include hypoxia, inflammation, and genetic lesions in oncogenes or tumor suppressors that alter disease cell gene expression.

[0524] Angiogenesis also plays a role in inflammatory diseases. These diseases have a proliferative component, similar to a tumor focus. In rheumatoid arthritis, one component of this is characterized by aberrant proliferation of synovial fibroblasts, resulting in pannus formation. The pannus is composed of synovial fibroblasts which have some phenotypic characteristics with transformed cells. As a pannus grows within the joint it expresses many proangiogenic signals, and experiences many of the same neo-angiogenic requirements as a tumor. The need for additional blood supply, neoangiogenesis, is critical. Similarly, many chronic inflammatory conditions also have a proliferative component in which some of the cells composing it may have characteristics usually attributed to transformed cells.

[0525] Another example of a condition involving excess angiogenesis is diabetic retinopathy (Lip et al. Br J Ophthalmology 88: 1543, 2004)). Diabetic retinopathy has angiogenic, inflammatory and proliferative components; overexpression of VEGF, and angiopoietin-2 are common. This overexpression is likely required for disease-associated remodeling and branching of blood vessels, which then supports the proliferative component of the disease.

[0526] 2. Angiogenesis

[0527] Angiogenesis includes several steps, including the recruitment of circulating endothelial cell precursors (CEPs), stimulation of new endothelial cell (EC) growth by growth factors, the degradation of the ECM by proteases, proliferation of ECs and migration into the target, which could be a tumor site or another proliferative site caused by inflammation. This results in the eventual formation of new capillary tubes. Such blood vessels are not necessarily normal in structure. They may have chaotic architecture and blood flow. Due to an imbalance of angiogenic regulators such as vascular endothelial growth factor, (VEGF) and angiopoietins, the new vessels supplying tumorous or inflammatory sites are tortuous and dilated with an uneven diameter, excessive branching, and shunting. Blood flow is variable, with areas of hypoxia and acidosis leading to the selection of variants that are resistant to hypoxia-induced apoptosis (often due to the loss of p53 expression); and enhanced production of proangiogenic signals. Disease-associated vessel walls have numerous openings, widened interendothelial junctions, and discontinuous or absent basement membrane; this contributes to the high vascular permeability of these vessels and, together with lack of functional lymphatics/drainage, causes interstitial hypertension. Disease-associated blood vessels may lack perivascular cells such as pericytes and smooth muscle cells that normally regulate vasoactive control in response to tissue metabolic needs. Unlike normal blood vessels, the vascular lining of tumor vessels is not a homogenous layer of ECs but often consists of a mosaic of ECs and tumor cells; the concept of cancer cell-derived vascular channels, which may be lined by ECM secreted by the tumor cells, is referred to as vascular mimicry.

[0528] A similar situation occurs where blood vessels rapidly invade sites of acute inflammation. The ECs of angiogenic blood vessels are unlike quiescent ECs found in adult vessels, where only 0.01% of ECs are dividing. During tumor angiogenesis, ECs are highly proliferative and express a number of plasma membrane proteins that are characteristic of activated endothelium, including growth factor receptors and adhesion molecules such as integrins. Tumors utilize a number of mechanisms to promote their vascularization, and in each case they subvert normal angiogenic processes to suit this purpose. For this reason, increased production of angiogenic factors, both proliferative with respect to endothelium; and structural (allowing for increased branching of the neovasculature) are likely to occur in disease foci, as in cancer or chronic inflammatory disease.

[0529] 3. Cell Surface Receptors in Angiogenesis

[0530] Cell surface receptors including RTKs, and their ligands play a role in the regulation of angiogenesis (see for example, FIG. 1). Angiogenic endothelium expresses a number of receptors not found on resting endothelium. These include receptor tyrosine kinases (RTK) and integrins that bind to the extracellular matrix and mediate endothelial cells adhesion, migration, and invasion.

[0531] Endothelial cells (ECs) also express RTK (i.e., the FGF and PDGF receptors) that are found on many other cell types. Functions mediated by activated RTK include proliferation, migration, and enhanced survival of endothelial cells, as well as regulation of the recruitment of perivascular cells and bloodborne circulating endothelial precursors and hematopoietic stem cells to the tumor. One example of a CSR involved in angiogenesis is VEGFR. VEGFR-1 receptors and VEGF-A ligand are involved in cell proliferation, migration and differentiation in angiogenesis. VEGF-A is a heparin-binding glycoprotein with at least four isoforms that regulate blood vessel formation by binding to RTKs, VEGFR-1 and VEGFR-2. These VEGF receptors are expressed on all ECs in addition to a subset of hematopoietic cells. VEGFR-2 regulates EC proliferation, migration, and survival, while VEGFR-1 may act as an antagonist of R1 in ECs but also can plays a role in angioblast differentiation during embryogenesis.

[0532] Additional signaling pathways also are involved in angiogenesis. The angiopoietin, Ang1, produced by stromal cells, binds to the EC RTK TEK and promotes the interaction of ECs with the ECM and perivascular cells, such as pericytes and smooth muscle cells, to form tight, non-leaky vessels. PDGF and basic fibroblast growth factor (bFGF) help to recruit these perivascular cells. Ang1 is required for maintaining the quiescence and stability of mature blood vessels and prevents the vascular permeability normally induced by VEGF and inflammatory cytokines.

[0533] Proangiogenic cytokines, chemokines, and growth factors secreted by stromal cells or inflammatory cells make important contributions to neovascularization, including bFGF, transforming growth factor-alpha, TNF-alpha, and IL-8. In contrast to normal endothelium, angiogenic endothelium overexpresses specific members of the integrin family of ECM-binding proteins that mediate EC adhesion, migration, and survival. Integrins mediate spreading and migration of ECs and are required for angiogenesis induced by VEGF and bFGF, which in turn can upregulate EC integrin expression. EC adhesion molecules can be upregulated (i.e., by VEGF, TNF-alpha). VEGF promotes the mobilization and recruitment of circulating endothelial cell precursors (CEPs) and hematopoietic stem cells (HSCs) to tumors where they colocalize and appear to cooperate in neovessel formation. CEPs express VEGFR-2, while HSCs express VEGFR-1, a receptor, or VEGF and P1GF. Both CEPs and HSCs are derived from a common precursor, the hemangioblast. CEPs are thought to differentiate into ECs, whereas the role of HSC-derived cells (such as tumor-associated macrophages) may be to secrete angiogenic factors required for sprouting and stabilization of ECs (VEGF, bFGF, angiopoietins) and to activate MMPs, resulting in ECM remodeling and growth factor release. In mouse tumor models and in human cancers, increased numbers of CEPs and subsets of VEGFR-1 or VEGFR-expressing HSCs can be detected in the circulation, which may correlate with increased levels of serum VEGF.

[0534] 4. Tumor and Inflammatory Diseases

[0535] Tumors secrete trophic angiogenic molecules, such as VEGF family of endothelial growth factors, that induce the proliferation and migration of host ECs into the tumor. Tumor vessels appear to be more dependent on VEGFR signaling for growth and survival than normal ECs. Sprouting in normal and pathogenic angiogenesis is regulated by three families of transmembrane RTKs expressed on ECs and their ligand: VEGFs, angiopoietins, and ephrins, which are produced by tumor cells, inflammatory cells, or stromal cells in the microenvironment of the disease site. Tumor or inflammatory disease-associated angiogenesis is a complex process involving many different cell types that proliferate, migrate, invade, and differentiate in response to signals from microenvironment. Endothelial cells (ECs) sprout from host vessels in response to VEGF, bFGF, Ang2, and other proangiogenic stimuli. Sprouting is stimulated by VEGF/VEGFR-2, Ang2/TEK, and integrin/extracellular matrix (ECM) interactions. Bone marrow-derived circulating endothelial precursors (CEPs) migrate to the tumor in response to VEGF and differentiate into ECs, while hematopoietic stem cells differentiate into leukocytes, including tumor/disease site-associated macrophages that secrete angiogenic growth factors and produce MMPs that remodel the ECM and release bound growth factors.

[0536] When tumor cells arise in or metastasize to an avascular area, they grow to a size limited by hypoxia and nutrient deprivation. This condition, also likely to occur in other localized proliferative diseases, leads to the selection of cells that produce angiogenic factors. Hypoxia, a key regulator of tumor angiogenesis, causes the transcriptional induction of the gene(s) encoding VEGF by a process that involves stabilization of the transcription factor hypoxia-inducible factor (HIF) 1. Under normoxic conditions, EC HIF-1 levels are maintained at a low level by proteasome-mediated destruction regulated by a ubiquitin E3-ligase encoded by the VHL (Von Hippel-Lindau) tumor-suppressor locus. However, under hypoxic conditions, the HIF-1 protein is not hydroxylated and association with VHL does not occur; therefore HIF-1 levels increase, and target genes including VEGF, nitric oxide synthetase (NOS), and Ang2 are induced. Loss of the VHL genes, as occurs in familial and sporadic renal cell carcinomas, also results in HIF-1 stabilization and induction of VEGF. Most tumors have hypoxic regions due to poor blood flow, and tumor cells in these areas stain positive for HIF-1 expression. These are conditions that lead to the de novo formation of blood vessels from differentiating endothelial cells, as occurs during embryonic development, and angiogenesis under normal (wound healing, corpus luteum formation) and pathologic processes (tumor angiogenesis, inflammatory conditions such as rheumatoid arthritis).

[0537] For diseased cell-derived VEGF, such as may be produced by a growing tumor focus or by pannus formation in rheumatoid arthritis, to initiate sprouting from host vessels, the stability conferred by the Ang1/TEK pathway must be perturbed; this occurs by the secretion of Ang2 by ECs that are undergoing active remodeling. Ang2 binds to TEK and is a competitive inhibitor of Ang1 action: under the influence of Ang2, preexisting blood vessels become more responsive to remodeling signals, with less adherence of ECs to stroma and associated perivascular cells and more responsiveness to VEGF. Therefore, Ang2 is required at early stages of neoangiogenesis for destabilizing the vasculature by making host ECs more sensitive to angiogenic signals. Since tumor ECs are blocked by Ang2, there is no stabilization by the Ang1/TEK interaction, and tumor blood vessels are leaky, hemorrhagic, and have poor association of ECs with underlying stroma. Sprouting tumor ECs express high levels of the transmembrane protein Ephrin-B2 and its receptor, the RTK EPH whose signaling appears to work with the angiopoietins during vessel remodeling. During embryogenesis, EPH receptors are expressed on the endothelium of primordial venous vessels while the transmembrane ligand ephrin-B2 is expressed by cells of primordial arteries; the reciprocal expression may regulate differentiation and patterning of the vasculature.

[0538] Development of tumor lymphatics also is associated with expression of cell surface receptors, including VEGFR-3 and its ligands VEGF-C and VEGF-D. The role of these vessels in tumor cell metastasis to regional lymph nodes remains to be determined, since, as discussed above, interstitial pressures within tumors are high and most lymphatic vessels may exist in a collapsed and nonfunctional state. However, VEGF-C levels in primary human tumors, including lung, prostate, and colorectal cancers, correlate significantly with metastasis to regional lymph nodes, and therefore it is possible that expression of VEGF-C,D/R3 may contribute to disease spreading by maintaining an exit for tumor cells from the primary site to lymph nodes and beyond.

[0539] 5. Cell Surface Receptors and Treatment of Angiogenic Diseases and Conditions

[0540] Modulation of angiogenesis, neovascularization and/or cell proliferation can be used to treat diseases and conditions in which angiogenesis plays a role. For example, angiogenesis inhibitors can function by targeting the critical molecular pathways involved in EC proliferation, migration, and/or survival, many of which are unique to the activated endothelium in tumors. Inhibition of growth factor and adhesion-dependent signaling pathways can induce EC apoptosis with concomitant inhibition of tumor growth. ECs comprising the tumor vasculature are genetically stable and do not share genetic changes with tumor cells; the EC apoptosis pathways are therefore intact. Each EC of a tumor vessel helps provide nourishment to many tumor cells, and although tumor angiogenesis can be driven by a number of exogenous proangiogenic stimuli, experimental data indicate that blockade of a single growth factor (e.g., VEGF) can inhibit tumor-induced vascular growth. Because tumor blood vessels are distinct from normal ones, they may be selectively destroyed without affecting normal vessels.

[0541] Because cell surface receptors are involved in the regulation of angiogenesis, they can be therapeutic targets for treatment of diseases and conditions involving angiogenesis. Provided herein are CSR isoforms that can modulate one or more steps in the angiogenic process. CSR isoforms can be administered singly, in parallel or in other combinations. For instance, angiogenesis induced by bFGF can be blocked by inhibitors of the bFGFR such as a CSR isoform, and this can in turn inhibit activation of the VEGF pathway. The VEGFR pathway also can be blocked by a VEGFR isoform. CSR isoforms that modulate Ang/TEK and Ephrin/EPH pathways also can be administered to modulate angiogenesis. CSR isoforms that act as antagonists of the activity of VEGFR, bFGF, Ang2, TNF-alpha, TGF-alpha, and other factors such as ephrin antagonists, can be administered. These ligands and their receptors are required for the attraction of new endothelial cells, and/or their structural transformation into blood vessels by differentiation from circulating endothelial precursors (CEPs) or by inhibiting either tube formation or the needed branching. Hence, antagonizing one or more of these factors can inhibit the development and progression of cancer and inflammatory disease. As described herein, CSR isoforms can be administered as therapeutics for such diseases and conditions.

### L. Exemplary Treatments and Studies with CSR Isoforms

[0542] Provided herein are methods of treatment with CSR isoforms for diseases and conditions. CSR isoforms such as RTK isoforms and TNFR isoforms can be used in the treatment of a variety of diseases and conditions, including those described herein. Treatment can be effected by administering by suitable route formulations of the polypeptides, which can be provided in compositions as polypeptides and can be linked to targeting agents, for targeted delivery or encapsulated in delivery vehicles, such as liposomes. Alternatively, nucleic acids encoding the polypeptides can be administered as naked nucleic acids or in vectors, particularly gene therapy vectors. Gene therapy can be effected by any method known to those of skill in the art. Gene therapy can be effected in vivo by directly administering the nucleic acid or vector. For example, the nucleic acids can be delivered systemically, locally, topically or by any suitable route. The vectors or nucleic acids can be targeted by including targeting agents in delivery vehicle, such as a virus or liposome, or they can be conjugated to a targeting agent, such as an antibody. The vectors or nucleic acids can be introduced into cells ex vivo by removing cells from a subject or suitable donor, introducing the vector or nucleic acid into the cells and then introducing the modified cells into the subject.

[0543] The CSR isoforms provided herein can be used for treating a variety of disorders, particularly proliferative, immune and inflammatory disorders. Treatments, include, but are not limited to treatment of angiogenesis-related diseases and conditions including ocular diseases, atherosclerosis, cancer and vascular injuries, neurodegenerative diseases, including Alzheimer's disease, inflammatory diseases and conditions, including atherosclerosis, diseases and conditions associated with cell proliferation including cancers, and smooth muscle cell-associated conditions, and various autoimmune diseases. Exemplary treatments and preclinical studies are described for treatments and therapies with RTK and TNFR isoforms. Such descriptions are meant to be exemplary only and are not limited to a particular RTK or TNFR isoform. The particular treatment and dosage can be determined by one of skill in the art. Considerations in assessing treatment include, the disease to be treated, the severity and course of the disease, whether the molecule is administered for preventive or therapeutic purposes, previous therapy, the patient's clinical history and response to therapy, and the discretion of the attending physician.

[0544] 1. Angiogenesis-Related Conditions

[0545] RTK isoforms including, but not limited to, VEGFR, PDGFR, TIE/TEK, EGFR, and EphA and TNFR isoforms including TNFR1 and TNFR2 can be used in treatment of angiogenesis-related diseases and conditions, such as ocular diseases and conditions, including ocular diseases involving neovascularization. Ocular neovascular disease is characterized by invasion of new blood vessels into the structures of the eye, such as the retina or cornea. It is the most common cause of blindness and is involved in approximately twenty eye diseases. In age-related macular degeneration, the associated visual problems are caused by an ingrowth of choroidal capillaries through defects in Bruch's membrane with proliferation of fibrovascular tissue beneath the retinal pigment epithelium. Angiogenic damage also is associated with diabetic retinopathy, retinopathy of prematurity, corneal graft rejection, neovascular glaucoma and retrolental fibroplasia. Other diseases associated with corneal neovascularization include, but are not limited to, epidemic keratoconjunctivitis, Vitamin A deficiency, contact lens overwear, atopic keratitis, superior limbic keratitis, pterygium keratitis sicca, sjogrens, acne rosacea, phylectenulosis, syphilis, Mycobacteria infections, lipid degeneration, chemical burns, bacterial ulcers, fungal ulcers, Herpes simplex infections, Herpes zoster infections, protozoan infections, Karposi sarcoma, Mooren ulcer, Terrien's marginal degeneration, marginal keratolysis, rheumatoid arthritis, systemic lupus, polyarteritis, trauma, Wegeners sarcoidosis, Scleritis, Steven's Johnson disease, periphigoid radial keratotomy, and corneal graph rejection. Diseases associated with retinal/choroidal neovascularization include, but are not limited to, diabetic retinopathy, macular degeneration, sickle cell anemia, sarcoid, syphilis, pseudoxanthoma elasticum, Pagets disease, vein occlusion, artery occlusion, carotid obstructive disease, chronic uveitis/vitritis, mycobacterial infections, Lyme's disease, systemic lupus erythematosus, retinopathy of prematurity, Eales disease, Bechets disease, infections causing a retinitis or choroiditis, presumed ocular histoplasmosis, Bests disease, myopia, optic pits, Stargardt's disease, pars planitis, chronic retinal detachment, hyperviscosity syndromes, toxoplasmosis, trauma and post-laser complications. Other diseases include, but are not limited to, diseases associated with rubeosis (neovascularization of the angle) and diseases caused by the abnormal proliferation of fibrovascular or fibrous tissue including all forms of proliferative vitreoretinopathy.

[0546] RTK and TNFR isoform therapeutic effects on angiogenesis such as in treatment of ocular diseases can be assessed in animal models, for example in cornea implants, such as described herein. For example, modulation of angiogenesis such as for an RTK can be assessed in a nude mouse model such as epidermoid A431 tumors in nude mice and VEGF- or PIGF-transduced rat C6 gliomas implanted in nude mice. CSR isoforms can be injected as protein locally or systemically. Alternatively cells expressing CSR isoforms can be inoculated locally or at a site remote to the tumor. Tumors can be compared between control treated and CSR isoform treated models to observe phenotypes of tumor inhibition including poorly vascularized and pale tumors, necrosis, reduced proliferation and increased tumor-cell apoptosis. In one such treatment, Flt-1 isoforms are used to treat ocular disease and assessed in such models.

[0547] Examples of ocular disorders that can be treated with TIE/TEK isoforms are eye diseases characterized by ocular neovascularization including, but not limited to, diabetic retinopathy (a major complication of diabetes), retinopathy of prematurity (this devastating eye condition, that frequently leads to chronic vision problems and carries a high risk of blindness, is a severe complication during the care of premature infants), neovascular glaucoma, retinoblastoma, retrolental fibroplasia, rubeosis, uveitis, macular degeneration, and corneal graft neovascularization. Other eye inflammatory diseases, ocular tumors, and diseases associated with choroidal or iris neovascularization also can be treated with TIE/TEK isoforms.

[0548] PDGFR isoforms also can be used in the treatment of proliferative vitreoretinopathy. For example, an expression vector such as a retroviral vector is constructed containing a nucleic acid molecule encoding a PDGFR isoform. Rabbit conjunctival fibroblasts (RCFs) are produced which contain the expression vector by transfection, such as for a retrovirus vector, or by transformation, such as for a plasmid or chromosomal based vector. Expression of PDGFR isoform can be monitored in cells by means known in the art including use of an antibody which recognizes PDGFR isoform and by use of a peptide tag (e.g. a myc tag) and corresponding antibody. RCFs are injected into the vitreous part of an eye. For example, in a rabbit animal model, approximately 1×10⁵ RCFs are injected by gas vitreomy. Retrovirus expressing PDGFR isoform, ˜2×10⁷ CFU is injected on the same day. Effects on proliferative vitreoretinopathy can be observed, for example, 2-4 weeks following surgery, such as attenuation of the disease symptoms.

[0549] EphA isoforms can be used to treat diseases or conditions with misregulated and/or inappropriate angiogenesis, such as in eye diseases. For example, an EphA isoform can be assessed in an animal model such as a mouse corneal model for effects on ephrinA-1 induced angiogenesis. Hydron pellets containing ephrinA-1 alone or with EphA isoform protein are implanted in mouse cornea. Visual observations are taken on days following implantation to observe EphA isoform inhibition or reduction of angiogenesis. Anti-angiogenic treatments and methods such as described for VEGFR isoforms are applicable to EphA isoforms.

[0550] 2. Angiogenesis Related Atherosclerosis

[0551] RTK isoforms, for example VEGFR Flt-1 and TIE/TEK isoforms, can be used to treat angiogenesis conditions related to atherosclerosis such as neovascularization of atherosclerosis plaques. Plaques formed within the lumen of blood vessels have been shown to have angiogenic stimulatory activity. VEGF expression in human coronary atherosclerotic lesions is associated with the progression of human coronary atherosclerosis.

[0552] Animal models can be used to assess RTK isoforms in treatment of atherosclerosis. Apolipoprotein-E deficient mice (ApoE^{-/-}) are prone to atherosclerosis. Such mice are treated by injecting an RTK isoform, for example a VEGFR isoform, such as a Flt-1 intron fusion protein over a time course such as for 5 weeks starting at 5, 10 and 20 weeks of age. Lesions at the aortic root are assessed between control ApoE^{-/-} mice and isoform-treated ApoE^{-/-} mice to observe reduction of atherosclerotic lesions in isoform-treated mice.

[0553] 3. Additional Angiogenesis-Related Treatments

[0554] RTK isoforms such as VEGFR isoforms, for example, Flt1 isoforms, and EphA isoforms also can be used to treat angiogenic and inflammatory-related conditions such as proliferation of synoviocytes, infiltration of inflammatory cells, cartilage destruction and pannus formation, such as are present in rheumatoid arthritis (RA). An autoimmune model of collagen type-II induced arthritis, such as polyarticular arthritis induced in mice, can be used as a model for human RA. Mice treated with a VEGFR isoform, such as by local injection of protein, can be observed for reduction of arthritic symptoms including paw swelling, erythema and ankylosis. Reduction of synovial angiogenesis and synovial inflammation also can be observed.

[0555] Other angiogenesis-related conditions amenable to treatment with VEGFR isoforms include hemangioma. One of the most frequent angiogenic diseases of childhood is the hemangioma. In most cases, the tumors are benign and regress without intervention. In more severe cases, the tumors progress to large cavernous and infiltrative forms and create clinical complications. Systemic forms of hemangiomas, the hemangiomatoses, have a high mortality rate. Many cases of hemangiomas exist that cannot be treated or are difficult to treat with therapeutics currently in use.

[0556] VEGFR isoforms can be employed in the treatment of such diseases and conditions where angiogenesis is responsible for damage such as in Osler-Weber-Rendu disease, or hereditary hemorrhagic telangiectasia. This is an inherited disease characterized by multiple small angiomas, tumors of blood or lymph vessels. The angiomas are found in the skin and mucous membranes, often accompanied by epistaxis (nosebleeds) or gastrointestinal bleeding and sometimes with pulmonary or hepatic arteriovenous fistula. Diseases and disorders characterized by undesirable vascular permeability also can be treated by VEGFR isoforms. These include edema associated with brain tumors, ascites associated with malignancies, Meigs' syndrome, lung inflammation, nephrotic syndrome, pericardial effusion and pleural effusion.

[0557] Angiogenesis also is involved in normal physiological processes such as reproduction and wound healing. Angiogenesis is an important step in ovulation and also in implantation of the blastula after fertilization. Modulation of angiogenesis by VEGFR isoforms can be used to induce amenorrhea, to block ovulation or to prevent implantation by the blastula. VEGFR isoforms also can be used in surgical procedures. For example, in wound healing, excessive repair or fibroplasia can be a detrimental side effect of surgical procedures and may be caused or exacerbated by angiogenesis. Adhesions are a frequent complication of surgery and lead to problems such as small bowel obstruction.

[0558] PDGFR isoforms can be used in the regulation of neointima formation after arterial injury such as in arterial surgery. For example PDGFR-B isoforms can be used to regulate PDGF-BB induced cell proliferation such as involved in neointima formation. PDGFR isoforms can be assessed for example, in a balloon-injured rooster femoral artery model. An adenovirus vector expressing a PDGFR isoform is constructed and transduced in vivo in the arterial model. Neointima-associated thrombosis is assessed in the transduced arteries to observe reduction compared with controls.

[0559] RTK isoforms useful in treatment of angiogenesis-related diseases and conditions also can be used in combination therapies such as with anti-angiogenesis drugs, molecules which interact with other signaling molecules in RTK-related pathways, including modulation of VEGFR ligands. For example, the known anti-rheumatic drug, bucillamine (BUC), was shown to include within its mechanism of action the inhibition of VEGF production by synovial cells. Anti-rheumatic effects of BUC are mediated by suppression of angiogenesis and synovial proliferation in the arthritic synovium through the inhibition of VEGF production by synovial cells. Combination therapy of such drugs with VEGFR isoforms can allow multiple mechanisms and sites of action for treatment.

[0560] 4. Cancers

[0561] RTK isoforms such as isoforms of EGFR, TIE/TEK, VEGFR and FGFR can be used in treatment of cancers. RTK isoforms including, but not limited to, EGFR RTK isoforms, such as ErbB2 and ErbB3 isoforms, VEGFR isoforms such as Flt1 isoforms, FGFR isoforms such as FGFR-4 isoforms, and EphA1 isoforms can be used to treat cancer. Examples of cancer to be treated herein include, but are not limited to, carcinoma, lymphoma, blastoma, sarcoma, and leukemia or lymphoid malignancies. Additional examples of such cancers include squamous cell cancer (e.g. epithelial squamous cell cancer), lung cancer including small-cell lung cancer, non-small cell lung cancer, adenocarcinoma of the lung and squamous carcinoma of the lung, cancer of the peritoneum, hepatocellular cancer, gastric or stomach cancer including gastrointestinal cancer, pancreatic cancer, glioblastoma, cervical cancer, ovarian cancer, liver cancer, bladder cancer, hepatoma, breast cancer, colon cancer, rectal cancer, colorectal cancer, endometrial or uterine carcinoma, salivary gland carcinoma, kidney or renal cancer, prostate cancer, vulval cancer, thyroid cancer, hepatic carcinoma, anal carcinoma, penile carcinoma, as well as head and neck cancer. Combination therapies can be used with EGFR isoforms including anti-hormonal compounds, cardioprotectants, and anti-cancer agents such as chemotherapeutics and growth inhibitory agents.

[0562] Cancers treatable with EGFR isoforms generally are those that express an EGFR receptor or a receptor with which an EGF ligand interacts. Such cancers are known to those of skill in the art and/or can be identified by any means known in the art for detecting EGFR expression. An example of an ErbB2 expression diagnostic/prognostic assay available includes HERCEPTEST.RTM. (Dako). Paraffin embedded tissue sections from a tumor biopsy are subjected to the IHC assay and accorded a ErbB2 protein staining intensity criteria. Tumors accorded with less than a threshold score can be characterized as not overexpressing ErbB2, whereas those tumors with greater than or equal to a threshold score can be characterized as overexpressing ErbB2. In one example of treatment, ErbB2-overexpressing tumors are assessed as candidates for treatment with an EGFR isoform such as an ErbB2 isoform.

[0563] Isoforms provided herein can be used for treatment of cancers. For example, TIE/TEK isoforms can be used in the treatment of cancers such as by modulating tumor-related angiogenesis. Vascularization is involved in regulating cancer growth and spread. For example, inhibition of angiogenesis and neovascularization inhibits solid tumor growth and expansion. Tie/Tek receptors such as TEK have been shown to influence vascular development in normal and cancerous tissues. TIE/TEK isoforms can be used as an inhibitor of tumor angiogenesis. A TIE/TEK isoform is produced such as by expression of the protein in cells. For example, secreted forms of TIE/TEK isoform can be expressed in cells and harvested from the media. Protein can be purified or partially-purified by biochemical means known in the art and by uses of antibody purification, such as antibodies raised against TIE/TEK isoform or a portion thereof or by use of a tagged TIE/TEK isoform and a corresponding antibody. Effects on angiogenesis can be monitored in an animal model such as by treating rat cornea with TIE/TEK isoform formulated as conditioned media in hydron pellets surgically implanted into a micropocket of a rat cornea or as purified protein (e.g. 100 μg/dose) administered to the window chamber. For example, rat models such as F344 rats with avascular corneas can be used in combination with tumor-cell conditioned media or by implanting a fragment of a tumor into the window chamber of an eye to induce angiogenesis. Corneas can be examined histologically to detect inhibition of angiogenesis induced by tumor-cell conditioned media. TIE/TEK isoforms also can be used to treat malignant and metastatic conditions such as solid tumors, including primary and metastatic sarcomas and carcinomas.

[0564] FGFR-4 isoforms can be used to treat cancers, for example pituitary tumors. Animal models can be used to mimic progression of human pituitary tumor progress. For example, an N-terminally shortened form of FGFR, ptd-FGFR-4, expressed in transgenic mice recapitulates pituitary tumorigenesis (Ezzat et al. (2002) J. Clin. Invest. 109:69-78), including pituitary adenoma formation in the absence of prolonged and massive hyperplasia. FGFR-4 isoforms can be administered to ptd-FGFR-4 mice and the pituitary architecture and course of tumor progression compared with control mice.

[0565] 5. Alzheimer's Disease

[0566] Receptor isoforms, such EGFR isoforms, also can be used to treat inflammatory conditions and other conditions involving such responses, such as Alzheimer's disease and related conditions. A variety of mouse models are available for human Alzheimer's disease including transgenic mice overexpressing mutant amyloid precursor protein and mice expressing familial autosomal dominant-linked PS1 and mice expressing both proteins (PS1 M146L/APPK670N:M671L). Alzheimer's models are treated such as by injection of ErbB isoforms. Plaque development can be assessed such as by observation of neuritic plaques in the hippocampus, entorhinal cortex, and cerebral cortex, using staining and antibody immunoreactivity assays.

[0567] 6. Smooth Muscle Proliferative-Related Diseases and Conditions

[0568] CSR isoforms, including EGFR isoforms, such as ErbB isoforms, can be employed for the treatment of a variety of diseases and conditions involving smooth muscle cell proliferation in a mammal, such as a human. An example is treatment of cardiac diseases involving proliferation of vascular smooth muscle cells (VSMC) and leading to intimal hyperplasia such as vascular stenosis, restenosis resulting from angioplasty or surgery or stent implants, atherosclerosis and hypertension. In such conditions, an interplay of various cells and cytokines released act in autocrine, paracrine or juxtacrine manner, which result in migration of VSMCs from their normal location in media to the damaged intima. The migrated VSMCs proliferate excessively and lead to thickening of intima, which results in stenosis or occlusion of blood vessels. The problem is compounded by platelet aggregation and deposition at the site of lesion. Alpha-thrombin, a multifunctional serine protease, is concentrated at sites of vascular injury and stimulates VSMC proliferation. Following activation of this receptor, VSMCs produce and secrete various autocrine growth factors, including PDGF-AA, HB-EGF and TGF. EGFRs are involved in signal transduction cascades that ultimately result in migration and proliferation of fibroblasts and VSMCs, as well as stimulation of VSMCs to secrete various factors that are mitogenic for endothelial cells and induction of chemotactic responses in endothelial cells. Treatment with EGFR isoforms can be used to modulate such signaling and responses.

[0569] EGFR isoforms such as ErbB2 and ErbB3 isoforms can be used to treat conditions where EGFRs such as ErbB2 and ErbB3 modulate bladder SMCs, such as bladder wall thickening that occurs in response to obstructive syndromes affecting the lower urinary tract. EGFR isoforms can be used in controlling proliferation of bladder smooth muscle cells, and consequently in the prevention or treatment of urinary obstructive syndromes.

[0570] EGFR isoforms can be used to treat obstructive airway diseases with underlying pathology involving smooth muscle cell proliferation. One example is asthma which manifests in airway inflammation and bronchoconstriction. EGF has been shown to stimulate proliferation of human airway SMCs and is likely to be one of the factors involved in the pathological proliferation of airway SMCs in obstructive airway diseases. EGFR isoforms can be used to modulate effects and responses to EGF by EGFRs.

[0571] 7. Inflammatory Diseases

[0572] CSR isoforms such as TNFR isoforms can be used in the treatment of inflammatory diseases including central nervous system diseases (CNS), autoimmune diseases, airway hyper-responsiveness conditions such as in asthma, rheumatoid arthritis and inflammatory bowel disease.

[0573] TNF-α and LT are proinflammatory cytokines and critical mediators in inflammatory responses in diseases and conditions such as multiple sclerosis. TNF-α and LT-α are produced by infiltrating lymphocytes and macrophages and additionally by activated CNS parenchymal cells, microglial cells and astrocytes. In MS patients, TNF-α is overproduced in serum and cerebrospinal fluid. In lesions, TNF-α and TNFR are extensively expressed. TNF-α and LT-α can induce selective toxicity of primary oligodendrocytes and induce myelin damage in CNS tissues. Thus, these two cytokines have been implicated in demyelination.

[0574] Experimental autoimmune encephalomyelitis (EAE) can serve as a model for multiple sclerosis (MS)(see for example, Probert et al. (2000) Brain 123: 2005-2019). EAE can be induced in a number of genetically susceptible species by immunization with myelin and myelin components such as myelin basic protein, proteolipid protein and myelin oligodendrocyte glycoprotein (MOG). For example, MOG-induced EAE recapitulates essential features of human MS including the chronic, relapsing clinical disease course of the pathohistological triad of inflammation, reactive gliosis, and the formation of large confluent demyelinated plaques. Additional MS models include transgenic mice overexpressing TNF α, which model non-autoimmune mediated MS. Transgenic mice are engineered to express TNF-α locally in glial cells; human and murine TNF-α trigger MS-like symptoms. TNFR isoforms can be assessed in EAE animal models. Isoforms are administered, such as by injection, and the course and progression of symptoms is monitored compared to control animals.

[0575] Cytokines such as TNF-α also are involved in airway smooth muscle contractile properties. TNFR1 and TNFR2 play a role in modulating biological affects in airway smooth muscle. TNFR2 modulates calcium homeostasis and thereby modulates airway smooth muscle hyper-responsiveness. TNFR1 modulates effects of TNF-α in airway smooth muscle. Airway smooth muscle responses can be assessed in murine tracheal rings induced with carbachol. Effects, such as carbachol-induced contraction, in the presence and absence of TNF-α can be monitored. TNFR isoforms can be added to tracheal rings to assess the effects of isoforms on airway smooth muscle.

[0576] TNF-α/TNFRs modulate inflammation in diseases such as rheumatoid arthritis (RA) (Edwards et al. (2003) Adv Drug Deliv. Rev. 55(10):1315-36). TNFR isoforms, including TNFR1 isoforms, can be used to treat RA. For example, TNFR isoforms can be injected locally or systemically. Isoforms can be dosed daily or weekly. PEGylated TNFR isoforms can be used to reduce immunogenicity. Primate models are available for RA treatments. Response of tender and swollen joints can be monitored in subjects treated with TNFR isoforms and controls to assess TNFR isoform treatment.

[0577] 8. Combination Therapies

[0578] CSR isoforms such as RTK isoforms can be used in combination with each other and with other existing drugs and therapeutics to treat diseases and conditions. For example, as described herein a number of RTK-isoforms can be used to treat angiogenesis-related conditions and diseases and/or control tumor proliferation. Such treatments can be performed in conjunction with anti-angiogenic and/or anti-tumorigenic drugs and/or therapeutics. Examples of anti-angiogenic and anti-tumorigenic drugs and therapies useful for combination therapies include tyrosine kinase inhibitors and molecules capable of modulating tyrosine kinase signal transduction including, but not limited to, 4-aminopyrrolo[2,3-d]pyrimidines (see for example, U.S. Pat. No. 5,639,757), and quinazoline compounds and compositions (e.g., U.S. Pat. No. 5,792,771). Other compounds useful in combination therapies include steroids such as the angiostatic 4,9(11)-steroids and C21-oxygenated steroids, angiostatin, endostatin, vasculostatin, canstatin and maspin, angiopoietins, bacterial polysaccharide CM101 and the antibody LM609 (U.S. Pat. No. 5,753,230), thrombospondin (TSP-1), platelet factor 4 (PF4), interferons, metalloproteinase inhibitors, pharmacological agents including AGM-1470/TNP-470, thalidomide, and carboxyamidotriazole (CAI), cortisone such as in the presence of heparin or heparin fragments, anti-Invasive Factor, retinoic acids and paclitaxel (U.S. Pat. No. 5,716,981; incorporated herein by reference), shark cartilage extract, anionic polyamide or polyurea oligomers, oxindole derivatives, estradiol derivatives and thiazolopyrimidine derivatives.

[0579] Treatment of cancers including treatment of cancers overexpressing an EGFR can include combination therapy with an anticancer agent, a chemotherapeutic agent and growth inhibitory agent, including coadministration of cocktails of different chemotherapeutic agents. Examples of chemotherapeutic agents include taxanes (such as paclitaxel and doxetaxel) and anthracycline antibiotics. Preparation and dosing schedules for such chemotherapeutic agents may be used according to manufacturers' instructions or as determined empirically by the skilled practitioner. Preparation and dosing schedules for such chemotherapy also are described in Chemotherapy Service Ed., M. C. Perry, Williams & Wilkins, Baltimore, Md. (1992).

[0580] Additional compounds can be used in combination therapy with RTK isoforms. Anti-hormonal compounds can be used in combination therapies, such as with EGFR isoforms. Examples of such compounds include an anti-estrogen compound such as tamoxifen; an anti-progesterone such as onapristone and an anti-androgen such as flutamide, in dosages known for such molecules. It also can be beneficial to also coadminister a cardioprotectant (to prevent or reduce myocardial dysfunction that can be associated with therapy) or one or more cytokines. In addition to the above therapeutic regimes, the patient may be subjected to surgical removal of cancer cells and/or radiation therapy.

[0581] Adjuvants and other immune modulators can be used in combination with CSR isoforms in treating cancers, for example to increase immune response to tumor cells. Combination therapy can increase the effectiveness of treatments and in some cases, create synergistic effects such the combination is more effective than the additive effect of the treatments separately. Examples of adjuvants include, but are not limited to, bacterial DNA, nucleic acid fraction of attenuated mycobacterial cells (BCG; Bacillus-Calmette-Guerin), synthetic oligonucleotides from the BCG genome, and synthetic oligonucleotides containing CpG motifs (CpG ODN; Wooldridge et al. (1997) Blood 89:2994-2998), levamisole, aluminum hydroxide (alum), BCG, Incomplete Freud's Adjuvant (IFA), QS-21 (a plant derived immunostimulant), keyhole limpet hemocyanin (KLH), and dinitrophenyl (DNP). Examples of immune modulators include but are not limited to, cytokines such as interleukins (e.g., IL-2, IL-3, IL-4, IL-5, IL-6, IL-7, IL-9, IL-10, IL-11, IL-12, IL-13, IL-15, IL-16, IL-17, IL-18, IL-1α, IL-1β, and IL-1 RA), granulocyte colony stimulating factor (G-CSF), granulocyte-macrophage colony stimulating factor (GM-CSF), oncostatin M, erythropoietin, leukemia inhibitory factor (LIF), interferons, B7.1 (also known as CD80), B7.2 (also known as B70, CD86), TNF family members (TNF-α, TNF-β, LT-β, CD40 ligand, Fas ligand, CD27 ligand, CD30 ligand, 4-1BBL, Trail), and MIF, interferon, cytokines such as IL-2 and IL-12; and chemotherapy agents such as methotrexate and chlorambucil.

[0582] 9. Preclinical Studies

[0583] Model animal studies can be used in preclinical evaluation of RTK isoforms that are candidate therapeutics. Parameters that can be assessed include, but are not limited to efficacy and concentration-response, safety, pharmacokinetics, interspecies scaling and tissue distribution. Model animal studies include assays such as described herein as well as those known to one of skill in the art. Animal models can be used to obtain data that then can be extrapolated to human dosages for design of clinical trials and treatments with RTK isoforms. For example, efficacy and concentration-response VEGFR inhibitors in tumor-bearing mice can be extrapolated to human treatment (Mordenti et al., (1999) Toxicol Pathol. January-February; 27(1):14-21) in order to define clinical dosing regimens effective to maintain a therapeutic inhibitor, such as an antibody against VEGFR for human use in the required efficacious range. Similar models and dose studies can be applied to VEGFR isoform dosage determination and translation into appropriate human doses, as well as other techniques known to the skilled artisan. Preclinical safety studies and preclinical pharmacokinetics can be performed, for example in monkeys, mice, rats and rabbits. Pharmacokinetic data from mice, rats and monkeys has been used to predict the pharmacokinetics of the counterpart therapeutic in human using allometric scaling. Accordingly, appropriate dosage information can be determined for the treatment of human pathological conditions, including rheumatoid arthritis, ocular neovascularization and cancer. A humanized version of the anti-VEGF antibody has been employed in clinical trials as an anti-cancer agent (Brem, (1998) Cancer Res. 58(13):2784-92; Presta et al., (1997) Cancer Res. 57(20):4593-9) and such clinical data also can be considered as a reference source when designing therapeutic doses for VEGFR isoforms.

### M. Combination Therapies

[0584] CSR isoforms, including those provided herein, can be used in combination with each other, with other cell surface receptor isoforms, such as a herstatin or any described, for example, in U.S. application Ser. Nos. 09/942,959, 09/234,208, 09/506,079; U.S. Provisional Application Ser. Nos. 60/571,289, 60/580,990 and 60/666,825; and U.S. Pat. No. 6,414,130, published International PCT application Nos. WO 00/44403, WO 01/61356, WO 2005/016966, including but not limited, to those set forth in SEQ ID Nos. 320-359; and/or with other existing drugs and therapeutics to treat diseases and conditions, particularly those involving aberrant angiogenesis and/or neovascularization, including, but not limited to, cancers and other proliferative disorders, inflammatory diseases, autoimmune disorders, as set forth herein and known to those of skill in the art.

[0585] For example, a CSR isoform, such as a VEGF isoform, can be administered with an agent for treatment of diabetes. Such agents include agents for the treatment of any or all conditions such as diabetic periodontal disease, diabetic vascular disease, tubulointerstitial disease and diabetic neuropathy. In another example, a CSR isoform is administered with an agent that treats cancers including squamous cell cancer (e.g. epithelial squamous cell cancer), lung cancer including small-cell lung cancer, non-small cell lung cancer, adenocarcinoma of the lung and squamous carcinoma of the lung, cancer of the peritoneum, hepatocellular cancer, gastric or stomach cancer including gastrointestinal cancer, pancreatic cancer, glioblastoma, cervical cancer, ovarian cancer, liver cancer, bladder cancer, hepatoma, breast cancer, colon cancer, rectal cancer, colorectal cancer, endometrial or uterine carcinoma, salivary gland carcinoma, kidney or renal cancer, prostate cancer, vulval cancer, thyroid cancer, hepatic carcinoma, anal carcinoma, penile carcinoma, as well as head and neck cancer. Any of the CSR isoforms can be administered in combination with two or more agents for treatment of a disease or a condition.

[0586] Adjuvants and other immune modulators can be used in combination with isoforms in treating cancers, for example to increase immune response to tumor cells. Combination therapy can increase the effectiveness of treatments and in some cases, create synergistic effects such the combination is more effective than the additive effect of the treatments separately. Examples of adjuvants include, but are not limited to, bacterial DNA, nucleic acid fraction of attenuated mycobacterial cells (BCG; Bacillus-Calmette-Guerin), synthetic oligonucleotides from the BCG genome, and synthetic oligonucleotides containing CpG motifs (CpG ODN; Wooldridge et al. (1997) Blood 89:2994-2998), levamisole, aluminum hydroxide (alum), BCG, Incomplete Freud's Adjuvant (IFA), QS-21 (a plant derived immunostimulant), keyhole limpet hemocyanin (KLH), and dinitrophenyl (DNP). Examples of immune modulators include but are not limited to, cytokines such as interleukins (e.g., IL-2, IL-3, IL-4, IL-5, IL-6, IL-7, IL-9, IL-10, IL-11, IL-12, IL-13, IL-15, IL-16, IL-17, IL-18, IL-1α, IL-1β, and IL-1 RA), granulocyte colony stimulating factor (G-CSF), granulocyte-macrophage colony stimulating factor (GM-CSF), oncostatin M, erythropoietin, leukemia inhibitory factor (LIF), interferons, B7.1 (also known as CD80), B7.2 (also known as B70, CD86), TNF family members (TNF-α, TNF-β, LT-β, CD40 ligand, Fas ligand, CD27 ligand, CD30 ligand, 4-1BBL, Trail), and MIF, interferon, cytokines such as IL-2 and IL-12; and chemotherapy agents such as methotrexate and chlorambucil.

[0587] Combinations of different CSR isoforms including with herstatins and other agents, can be used for treating cancers and other disorders involving aberrant angiogenesis (see, e.g. FIG. 1 outlining targets in the angiogenesis and neovascularization pathway for such polypeptides and those described herein and in the above-noted copending and published applications U.S. application Ser. Nos. 09/942,959, 09/234,208, 09/506,079; U.S. Provisional Application Ser. Nos. 60/571,289, 60/580,990 and 60/666,825; and U.S. Pat. No. 6,414,130, published International PCT application Nos. WO 00/44403, WO 01/61356, WO 2005/016966 are provided. The cell surface receptors include receptor tyrosine kinases, such as members of the VEGFR, FGFR, PDGFR (including Rα, Rβ, CSF1R, Kit), MET (including c-Met, c-RON), TEK and EphA2 families. These also include ErbB2, ErbB3, ErbB4, DDR1, DDR2, EPHA, EPHB, FGFR-2, FGFR-3, FGFR-4, MET, PDGFR, TEK, Tie-1, KIT, ErbB2, VEGFR-1, VEGFR-2, VEGFR-3, Flt1, Flt3, TNFR1, TNFR2, RON, CSFR. Exemplary of such isoforms are the herstatins (see, SEQ ID Nos. 320-345), polypeptides that include the intron portion of a herstatin as well as any isoforms provided herein. The combinations of isoforms and/or drug agent selected is a function of the disease to be treated and is based upon consideration of the target tissues and cells and receptors expressed thereon.

[0588] The combinations, for example, can target two or more cell surface receptors or steps in the angiogenic and/or endothelial cell maintenance pathways or can target two or more cell surface receptors or steps in a disease process, such as any which one or both of these pathways are implicated, such as inflammatory diseases, tumors and all other noted herein and known to those of skill in the art. The two or more agents can be administered as a single composition or can be administered as two or more compositions (where there are more than two agents) simultaneously, intermittently or sequentially. They can be packaged as a kit that contains two or more compositions separately or as a combined composition and optionally with instructions for administration and/or devices for administration, such as syringes.

[0589] The following examples are included for illustrative purposes only and are not intended to limit the scope of the invention.

### N. EXAMPLES

### Example 1

### Method for Cloning CSR Isoforms

A. Preparation of Messenger RNA

[0590] mRNA isolated from major human tissue types from healthy or diseased tissues or cell lines were purchased from Clontech (BD Biosciences, Clontech, Palo Alto, Calif.) and Stratagene (La Jolla, Calif.). Equal amounts of mRNA were pooled and used as templates for reverse transcription-based PCR amplification (RT-PCR).

B. cDNA Synthesis

[0591] mRNA was denatured at 70° C. in the presence of 40% DMSO for 10 min and quenched on ice. First-strand cDNA was synthesized with either 200 ng oligo(dT) or 20 ng random hexamers in a 20-μl reaction containing 10% DMSO, 50 mM Tris-HCl (pH 8.3), 75 mM KCl, 3 mM MgCl₂, 10 mM DTT, 2 mM each dNTP, 5 μg mRNA, and 200 units of Stratascript reverse transcriptase (Stratagene, La Jolla, Calif.). After incubation at 37° C. for 1 h, the cDNA from both reactions were pooled and treated with 10 units of RNase H (Promega, Madison, Wis.).

C. PCR Amplification

[0592] Gene-specific PCR primers were selected using the Oligo 6.6 software (Molecular Biology Insights, Inc., Cascade, Colo.) and synthesized by Qiagen-Operon (Richmond, Calif.). The forward primers flank the start codon. The reverse primers flank the stop codon or were chosen from regions at least 1.5 kb downstream from the start codon (see Table 4). Each PCR reaction contained 10 ng of reverse-transcribed cDNA, 0.025 U/μl TaqPlus (Stratagene), 0.0035 U/μl PfuTurbo (Stratagene), 0.2 mM dNTP (Amersham, Piscataway, N.J.), and 0.2 μM forward and reverse primers in a total volume of 50 μl. PCR conditions were 35 cycles and 94.5° C. for 45 s, 58° C. for 50 s, and 72° C. for 5 min. The reaction was terminated with an elongation step of 72° C. for 10 min.

TABLE 3B
LIST OF GENES FOR CLONING CSR Isoforms

| Family | Member | nt ACC. # | Catalytic Domain | SEQ ID NO: | ORF | prt ACC. # | SEQ ID NO: |
|---|---|---|---|---|---|---|---|
| PDGFR | CSF1R | NM_005211 | 2012-3208 | 162 | 293-3211 | NP_005202 | 249 |
| | Flt3 | NM_004119 | 1861-2886 | 244 | 58-3039 | NP_004110 | 272 |
| | KIT | NM_000222 | 1762-2799 | 1 | 22-2952 | NP_000213 | 273 |
| | PDGFR-A | NM_006206 | 2147-3253 | 246 | 395-3664 | NP_006197 | 275 |
| | PDGFR-B | NM_002609 | 2133-3215 | 163 | 357-3677 | NP_002600 | 276 |
| DDR | DDR1 | NM_013993 | 2149-3057 | 156 | 337-3078 | NP_054699 | 250 |
| | DDR2 | NM_006182 | 2022-2900 | 227 | 354-2921 | NP_006173 | 251 |
| EPH | EphA1 | NM-005232 | 1939-2736 | 165 | 88-3018 | NP_005223 | 253 |
| | EphA2 | NM-004431 | 1956-2759 | 229 | 138-3068 | NP_004422 | 254 |
| | EphA3 | NM-005233 | 2086-2859 | 230 | 226-3177 | NP_005224 | 255 |
| | EphA4 | NM_004438 | 1885-2685 | 231 | 43-3003 | NP_004429 | 256 |
| | EphA5 | L36644 | 1259-1460 | 232 | 1-2976 | AAA74245 | 257 |
| | EphA6 | AL133666 | 691-1332 | 233 | 343-1347 | CAB63775 | 258 |
| | EphA7 | NM_004440 | 2092-2892 | 234 | 214-3210 | NP_004431 | 259 |
| | EphA8 | NM_020526 | 2028-2801 | 235 | 126-3143 | NP_065387 | 260 |
| | EphB1 | NM_004441 | 2051-2857 | 166 | 215-3169 | NP_004432 | 261 |
| | EphB2 | AF025304 | 1886-2681 | 236 | 26-3193 | AAB94602 | 262 |
| | EphB3 | NM_004443 | 2316-3122 | 237 | 438-3434 | NP_004434 | 263 |
| | EphB4 | NM_004444 | 2200-3006 | 238 | 376-3339 | NP_004435 | 264 |
| | EphB6 | NM_004445 | 2761-3498 | 239 | 799-3819 | NP_004436 | 265 |
| ERB | ErbB2 | NM_004448 | 2396-3164 | 240 | 239-4006 | NP_004439 | 266 |
| | ErbB3 | NM_001982 | 2318-3086 | 241 | 194-4222 | NP_001973 | 267 |
| | EGFR | NM_005228 | 2380-3148 | 228 | 247-3879 | NP_005219 | 252 |
| FGFR | FGFR-1 | M34641 | 1435-2263 | 164 | 10-2472 | AAA35835 | 268 |
| | FGFR-2 | NM_000141 | 2009-2872 | 242 | 593-3058 | NP_000132 | 269 |
| | FGFR-3 | NM_000142 | 1429-2292 | 243 | 40-2460 | NP_000133 | 270 |
| | FGFR-4 | NM_002011 | 1534-2394 | 2 | 157-2565 | NP_002002 | 271 |
| MET | MET | NM_000245 | 3419-4198 | 245 | 188-4360 | NP_000236 | 274 |
| | RON | NM_002447 | 3242-4260 | 159 | 29-4231 | NP_002438 | 277 |
| TEK | TEK | NM_000459 | 2603-3433 | 160 | 149-3523 | NP_000450 | 278 |
| | Tie-1 | NM_005424 | 2579-3409 | 161 | 80-3496 | NP_005415 | 279 |
| TNFR | TNFR1 | NM_001065 | 1323-1598(DD) | 247 | 282-1649 | NP_001056 | 280 |
| | TNFR2 | NM_001066 | n/a | 3 | 90-1475 | NP_001057 | 281 |
| VEGFR | VEGFR-1 | NM_002019 | 2704-3702 | 157 | 250-4266 | NP_002010 | 282 |
| | VEGFR-2 | NM_002253 | 2779-3792 | 248 | 304-4374 | NP_002244 | 283 |
| | VEGFR-3 | NM_002020 | 2530-3525 | 158 | 22-3918 | NP_002011 | 284 |

[0593] TABLE 4
PRIMERS FOR PCR CLONING.

| | | |
|---|---|---|
| SEQ | | |
| ID | | |
| NO | Primer | Sequence |

| | | |
|---|---|---|
| 4 | CSFIR_F1 | CTG CCA CTT CCC CAC CGA GG |
| 5 | DDR1_F1 | GGG ATC AGG AGC TAT GGG ACC A |
| 6 | DDR2_F1 | CTG AGA TGA TCC TGA TTC CCA GAA |
| 7 | EphA1_F1 | GGA GCT ATG GAG CGG CGC TG |
| 8 | EphA2_F1 | AGC GAG AAG CGC GGC ATG GA |
| 9 | EphA3_F1 | CAC CAG CAA CAT GGA TTG TCA GC |
| 10 | EphA4_F1 | CGA ACC ATG GCT GGG ATT TTC TA |
| 11 | EphA7_F1 | ATA AAA CCT GCT CAT GCA CCA TG |
| 12 | EphB1_F1 | GCG ATG GCC CTG GAT TAT CTA |
| 13 | EphB2_F1 | CCC CGG GAA GCG CAG CCA |
| 14 | EphB3_F1 | GCT CCT AGA GCT GCC ACG GC |
| 15 | EphB4_F1 | GAT CCT ACC CGA GTG AGG CGG |
| 16 | CSFIR_R1 | GGG CTC CTG CAG AGA TGG GTA |
| 17 | DDR1_R1 | AGA GCC ATT GGG GAC ACA GGG A |
| 18 | DDR2_R1 | AGC CTG ACT CCT CCT CCC CTG |
| 19 | EphA1_R1 | AGC TCT GTC AGC AAG ACC CTG G |
| 20 | EphA2_R1 | AGG TGG TGT CTG GGG CCA GGT C |
| 21 | EphA3_R1 | GTC AGG CTT GAG GCT ACT GAT GG |
| 22 | EphA4_R1 | AAC ATA GGA AGT GAG AGG GTT CAG G |
| 23 | EphA7_R1 | ACT CCA TTG GGA TGC TCT GGT TC |
| 24 | EphB1_R1 | AGC CCA TCA ATC CTT GCT GTG |
| 25 | EphB2_R1 | GCG TGC CCG CAC CTG GAA GA |
| 26 | EphB3_R1 | GCT GGT CAC TGT GGA GGC GA |
| 27 | EphB4_R1 | GGT AGC TGG CTC CCC GCT TCA |
| 28 | CSFIR_R2 | CCG AGG GTC TTA CCA AAC TGC |
| 29 | DDR1_R2 | AAG CGG AGT CGA GAT CGA GGG A |
| 30 | DDR2_R2 | GGG GAA CTC CTC CAC AGC CA |
| 31 | EphA1_R2 | CGG GTA AAG TCC AAG GCT CCC |
| 32 | EphA2_R2 | GAC ACA GGA TGG ATG GAT CTC GG |
| 33 | EphA3_R2 | ATC AAT GGA TAT GTT GGT GGC ATC |
| 34 | EphA4_R2 | AGG ATG CGT CAA TTT CTT TGG CA |
| 35 | EphA7_R2 | CTG CAC CAA TCA CAC GCT CAA |
| 36 | EphB1_R2 | ATC AAT CTC CTT GGC AAA CTC C |
| 37 | EphB2_R2 | GCC CAT GAT GGA GGC TTC GC |
| 38 | EphB3_R2 | ACG CAG GAC ACG TCG ATC TCC |
| 39 | EphB4_R2 | ACC TGC ACC AAT CAC CTC TTC AA |
| 40 | EphB6_F1 | AGA GTG GCG GGC ATG GTG TG |
| 41 | EphB6_R1 | GCG GAG CTG ATA GTC CAG GAT G |
| 42 | EphB6_R2 | CCT GTC CCA ATG ACC TCC TCA A |
| 43 | EphA6_F1 | GGA GAT GAA AGA CTC TCC ATT TCA AG |
| 44 | FGFR-1_F1 | ATT CGG GAT GTG GAG CTG GA |
| 45 | FGFR-2_F1 | AGG ACC GGG GAT TGG TAC CG |
| 46 | FGFR-3_F1 | CAT GGG CGC CCC TGC CTG |
| 47 | FGFR-4_F1 | AGA AGG AGA TGC GGC TGC TG |
| 48 | TNFR1(p55)_F1 | AGC TGT CTG GCA TGG GCC TCT C |
| 49 | TNFR2(p75)_F1 | ACC GGA CCC CGC CCG CAC |
| 50 | EphA6_R1 | ATCT TAG ACC GAC AGA AAA TTT GGC |
| 51 | FGFR-1_R1 | CAA GGG ACC ATC CTG CGT GC |
| 52 | FGFR-2_R1 | AGG GGC TTG CCC AGT GTC AG |
| 53 | FGFR-3_R1 | GCT CCC ATT TGG GGT CGG CA |
| 54 | FGFR-4_R1 | CGG GGG AAC TCC CAT AGT GG |
| 55 | TNFR1(p55)_R1 | GGC GCA GCC TCA TCT GAG AAG A |
| 56 | TNFR2(p75)_R1 | CAC AGC CCA CAC CGG CCT GG |
| 57 | Flt3_F1 | GGA GGC CAT GCC GGC GTT G |
| 58 | KIT-F1 | CGC AGC TAC CGC GAT GAG AGG |
| 59 | MET_F1 | CTC ATA ATG AAG GCC CCC GC |
| 60 | PDGFR-A_F1 | AAG TTT CCC AGA GCT ATG GGG A |
| 61 | PDGFR-B_F1 | AGC AGC AAG GAC ACC ATG CG |
| 62 | RON_F1 | GGT CCC AGC TCG CCT CGA TG |
| 63 | TEK_F1 | AGA TTT GGG GAA GCA TGG ACT C |
| 64 | Tie-1_F1 | CGG CCT CTG GAG TAT GGT CTG |
| 65 | VEGFR-1_F1 | CAT GGT CAG CTA CTG GGA CAC C |
| 66 | VEGFR-2_F1 | AGG TGC AGG ATG CAG AGC AAG |
| 67 | VEGFR-3_F1 | AGC GGC CGG AGA TGC AGC G |
| 68 | Flt3_R1 | CTG CTC GAC ACC CAC TGT CCA |
| 69 | KIT-R1 | GCA GAA GTC TTG CCC ACA TCG |
| 70 | MET_R1 | CTT CGT GAT CTT CTT CCC AGT GA |
| 71 | PDGFR-A_R1 | AGA TTC TTA GCC AGG CAT CGC A |
| 72 | PDGFR-B_R1 | AGC GCA CCG ACA GTG GCC GA |
| 73 | RON_R1 | GCA CGG GCT GCC CAC TGT CA |
| 74 | TEK_R1 | CTG TCC GAG GTT CCA AAT AGT TGA |
| 75 | Tie-1_R1 | CGT TCT CAC TGG GGT CCA CCA |
| 76 | VEGFR-1_R1 | ATT ATT GCC ATG CGC TGA GTG A |
| 77 | VEGFR-2_R1 | GCC GCT TGG ATA ACA AGG GTA |
| 78 | VEGFR-3_R1 | AAC TCG GTC CAG GTG TCC AGG C |
| 79 | Flt3_R2 | CTT GGA AAC TCC CAT TTG AGA TCA |
| 80 | KIT-R2 | ACA ACC TTC CCG AAA GCT CCA |
| 81 | MET_R2 | ACT ACA TGC TGC ACT GCC TGG A |
| 82 | PDGFR-A_R2 | CCC GAC CAA GCA CTA GTC CAT C |
| 83 | PDGFR-B_R2 | CCA GAG CCG AGG GTG CGT CC |
| 84 | RON_R2 | CAG GTC ATT CAG GTT GGG AGG A |
| 85 | TEK_R2 | ATT TGA TGT CAT TCC AGT CAA GCA |
| 86 | Tie-1_R2 | AGC ACT GGG TAG CTC AGG GGC |
| 87 | VEGFR-1_R2 | AAC TCC CAC TTG CTG GCA TCA |
| 88 | VEGFR-2_R2 | AAT TCC CAT TTG CTG GCA TCA |
| 89 | VEGFR-3_R2 | ATT CCC ACT GGC TGG CAT CGT A |

D. Cloning and Sequencing of PCR Products

[0594] PCR products were electrophoresed on a 1% agarose gel, and DNA from detectable bands was stained with Gelstar (BioWhitaker Molecular Application, Walkersville, Md.). The DNA bands were extracted with the QiaQuick gel extraction kit (Qiagen, Valencia, Calif.), ligated into the pDrive UA-cloning vector (Qiagen), and transformed into Escherichia coli. Recombinant plasmids were selected on LB agar plates containing 100 μg/ml carbenicillin. For each transfection, 192 colonies were randomly picked and their cDNA insert sizes were determined by PCR with M13 forward and reverse vector primers. Representative clones from PCR products with distinguishable molecular masses as visualized by fluorescence imaging (Alpha Innotech, San Leandro, Calif.) were then sequenced from both directions with vector primers (M13 forward and reverse). All clones were sequenced entirely using custom primers for directed sequencing completion across gapped regions.

E. Sequence Analysis

[0595] Computational analysis of alternative splicing was performed by alignment of each cDNA sequence to its respective genomic sequence using SIM4 (a computer program for analysis of splice variants). Only transcripts with canonical (e.g. GT-AG) donor-acceptor splicing sites were considered for analysis. Clones encoding CSR isoforms were studied further (see below, Table 5).

F. Targeted Cloning and Expression

[0596] Computational analysis of public EST databases identified potential splice variants with intron retention or insertion. Cloning of potential splice variants identified by EST database analysis were performed by RT-PCR using primers flanking the open reading frame as described above.

[0597] Sequence-verified CSR isoform encoding cDNA molecules were and can be subcloned into a replication-deficient recombinant adenoviral vector under control of the CMV promoter, following the manufacturer's instruction (Invitrogen, Cat# K4930-00). The recombinant adenoviruses were produced using 293A cells (Invitrogen). Supernatants from the infected 293 cells were analyzed by immunoblotting using an appropriate antibody.

G. Exemplary CSR Isoforms

[0598] Exemplary CSR isoforms, prepared using the methods described herein, are set forth below in Table 5. Nucleic acid molecules encoding CSR isoforms are provided and include those that contain sequences of nucleotides or ribonucleotides or nucleotide or ribonucleotide analogs as set forth in any of SEQ ID NOS: 92, 94, 96, 114, 116, 118, 120, 122, 124, 126, 128, 130, 132, 134, 136, 138, 140, 142, 144, 146, 148, 150, 152, 154, 167, 169, 171, 173, 175, 177, 179, 181, 183, 185, 187, 189, 191, 193, 195, 197, 199, 201, 203, 205, 207, 209, 211, 213, 215, 217, 219, 221, 223, and 225. The amino acid sequences of exemplary CSR isoform polypeptides are set forth in any of SEQ ID NOS: 91, 93, 95, 115, 117, 119, 121, 123, 125, 127, 129, 131, 133, 135, 137, 139, 141, 143, 145, 147, 149, 151, 153, 155, 168, 170, 172, 174, 176, 178, 180, 182, 184, 186, 188, 190, 182, 184, 196, 198, 200, 202, 204, 206, 208, 210, 212, 214, 216, 218, 220, 222, 224, and 226.

TABLE 5
CSR Isoforms

| | | | | SEQ ID |
|---|---|---|---|---|
| Gene | ID | Type | Length | NOS |
| FGFR-4 | SR002_A11 | Intron | 72 aa | 90-91 |
| | | fusion | | |
| KIT | SR002_H01 | Intron | 413 aa | 92-93 |
| | | fusion | | |
| TNFR2 | SR003_H02 | Intron | 155 aa | 94-95 |
| | | fusion | | |
| DDR1 | SR005_A11 | Exon | 286 aa | 114-115 |
| | | deletion | | |
| DDR1 | SR005_A10 | Exon | 243 aa | 116-117 |
| | | deletion | | |
| FGFR-1 | SR001_E12 | Exon | 228 aa | 118-119 |
| | | deletions | | |
| FGFR-4 | SR002_A10 | Intron | 446 aa | 120-121 |
| | | fusion | | |
| VEGFR-1 | SR004_C05 | Intron | 174 aa | 122-123 |
| | | fusion | | |
| VEGFR-3 | SR007_E10 | Exon | 227 aa | 124-125 |
| | | short | | |
| VEGFR-3 | SR007_F05 | Exon | 295 aa | 126-127 |
| | | deletion | | |
| RON | SR004_C11 | Intron | 495 aa | 128-129 |
| | | fusion | | |
| TEK | SR007_G02 | Intron | 367 aa | 130-131 |
| | | fusion, | | |
| | | exon | | |
| | | shorten | | |
| TEK | SR007_H03 | Exon | 468 aa | 132-133 |
| | | deletion, | | |
| | | Intron | | |
| | | fusion | | |
| Tie-1 | SR006_A04 | Intron | 251 aa | 134-135 |
| | | fusion | | |
| Tie-1 | SR006_B07 | Intron | 379 aa | 136-137 |
| | | fusion | | |
| Tie-1 | SR006_B06 | Intron | 161 aa | 138-139 |
| | | fusion | | |
| Tie-1 | SR006_B12 | Intron | 414 aa | 140-141 |
| | | fusion | | |
| Tie-1 | SR006_B10 | Exon | 317 aa | 142-143 |
| | | deletion | | |
| CSF1R | SR005_A06 | Exon | 306 aa | 144-145 |
| | | deletion | | |
| PDGFR-B | SR007_C09 | Exon | 336 aa | 146-147 |
| | | shorten | | |
| | | (4 bp) | | |
| EphA1 | SR004_G03 | Intron | 474 aa | 148-149 |
| | | fusion | | |
| EphA1 | SR004_G07 | Intron | 311 aa | 150-151 |
| | | fusion, | | |
| | | exon | | |
| | | deletion | | |
| EphA1 | SR004_H03 | Intron | 490 aa | 152-153 |
| | | fusion | | |
| EphB1 | SR005_D06 | Exon | 242 aa | 154-155 |
| | | shorten | | |
| EphA2 | SR016_E12 | Intron | 497 aa | 167-168 |
| | | fusion | | |
| EphB4 | SR012_C08 | Exon | 306 aa | 169-170 |
| | | deletion | | |
| EphB4 | SR012_D11 | Exon | 516 aa | 171-172 |
| | | shorten | | |
| EphB4 | SR012_E11 | Exon | 414 aa | 173-174 |
| | | shorted | | |
| FGFR-1 | SR022_C02 | Exon | 320 aa | 175-176 |
| | | deletion, | | |
| | | intron | | |
| | | fusion | | |
| FGFR-2 | SR022_C10 | Intron | 266 aa | 177-178 |
| | | fusion | | |
| FGFR-2 | SR022_C11 | Intron | 317 aa | 179-180 |
| | | fusion | | |
| FGFR-2 | SR022_D04 | Exon | 281 aa | 181-182 |
| | | deletion, | | |
| | | intron | | |
| | | fusion | | |
| FGFR-2 | SR022_D06 | Intron | 396 aa | 183-184 |
| | | fusion | | |
| MET | SR020_C10 | Intron | 413 aa | 185-186 |
| | | fusion | | |
| MET | SR020_C12 | Intron | 468 aa | 187-188 |
| | | fusion | | |
| MET | SR020_D04 | Intron | 518 aa | 189-190 |
| | | fusion | | |
| MET | SR020_D07 | Intron | 596 aa | 191-192 |
| | | fusion | | |
| MET | SR020_D11 | Intron | 408 aa | 193-194 |
| | | fusion | | |
| MET | SR020_E11 | Intron | 621 aa | 195-196 |
| | | fusion | | |
| MET | SR020_F08 | Intron | 664 aa | 197-198 |
| | | fusion | | |
| MET | SR020_F11 | Intron | 719 aa | 199-200 |
| | | fusion | | |
| MET | SR020_F12 | Intron | 697 aa | 201-202 |
| | | fusion | | |
| MET | SR020_G03 | Exon | 691 aa | 203-204 |
| | | shorten, | | |
| | | intron | | |
| | | fusion | | |
| MET | SR020_G07 | Intron | 661 aa | 205-206 |
| | | fusion | | |
| MET | SR020_H03 | Intron | 755 aa | 207-208 |
| | | fusion | | |
| MET | SR020_H06 | Intron | 823 aa | 209-210 |
| | | fusion | | |
| MET | SR020_H07 | Intron | 877 aa | 211-212 |
| | | fusion | | |
| MET | SR020_H08 | Exon | 764 aa | 213-214 |
| | | deletion, | | |
| | | intron | | |
| | | fusion | | |
| RON | SR014_C01 | Intron | 541 aa | 215-216 |
| | | fusion | | |
| RON | SR014_C09 | Intron | 908 aa | 217-218 |
| | | fusion | | |
| RON | SR014_E12 | Intron | 647 aa | 219-220 |
| | | fusion | | |
| Tie-1 | SR016_G03 | Intron | 751 aa | 221-222 |
| | | fusion | | |
| VEGFR-1 | SR01_C02 | Intron | 541 aa | 100 |
| | | fusion | | |
| VEGFR-2 | SR015_F01 | Exon | 712 aa | 223-224 |
| | | shorten | | |
| VEGFR-3 | SR015_G09 | Intron | 765 aa | 225-226 |
| | | fusion | | |

### Example 2

### CSR Isoform Expression Assays

A. Analysis of mRNA Expression

[0599] Expression of the cloned CSR isoforms were determined by RT-PCR (or quantitative PCR) in various tissues including: brain, heart, kidney, placenta, prostate, spleen, spinal cord, trachea, testis, uterus, fetal brain, fetal liver, adrenal gland, liver, lung, small intestine, salivary gland, skeletal muscle, thymus, thyroid and a variety of tumor tissues including: breast, colon, kidney, lung, ovary, stomach, uterus, MDA435 and HEPG2. PCR primers (such as set forth in Example 1, Table 4) were selected within the exclusive regions of retained introns or alternative exons, such that only the soluble receptor-specific signals were amplified. Each PCR reaction was performed with 2 cycle numbers (e.g. 32 versus 38 cycles) for the purpose of getting semi-quantitative results. Expression of each cloned CSR isoform was compared to the expression of the corresponding wildtype membrane receptor.

[0600] EphA2 (GenBank No. NM_{—}004431 or SEQ ID NO: 229) mRNA is highly expressed in brain, heart, kidney, placenta, prostate, spleen, spinal cord, trachea, testis, uterus, fetal brain, fetal liver, adrenal gland, liver, lung, small intestine, salivary gland, skeletal muscle, thymus, and thyroid as well as expressed in the following tumor tissues: breast, colon, kidney, lung, ovary, stomach, uterus, MDA435 and HEPG2. Soluble EphA2 (SEQ ID NO: 167) mRNA is highly expressed in the trachea, lung, small intestine, and salivary gland and to a lesser extent expressed in kidney, placenta, fetal brain, fetal liver, adrenal gland, skeletal muscle, thymus, brain, heart, spleen, spinal cord, uterus, and liver as well as highly expressed in stomach tumor and to a lesser extent in colon, kidney, lung, ovary, uterus, MDA435 and HEPG2 tumor tissues.

[0601] FGFR-4 (GenBank No. NM_{—}002011 set forth as SEQ ID NO: 2) mRNA is expressed in a variety of human tissues, including brain, heart, kidney, placenta, prostate, spleen, spinal cord, trachea, testis, uterus, fetal brain, fetal liver, adrenal gland, liver, lung, small intestine, salivary gland, skeletal muscle, thymus, and thyroid. FGFR-4 mRNA also is expressed in the following tumor tissues: breast, colon, kidney, lung, ovary, stomach, uterus, and HEPG2. Soluble FGFR-4 (SEQ ID NO: 120) mRNA is highly expressed in the kidney, spleen, testis, fetal brain, fetal liver, adrenal gland, liver, lung, small intestine and to a lesser extent expressed in brain, heart, placenta, prostate, spinal cord, trachea, uterus, skeletal muscle, thymus and thyroid. Soluble FGFR-4 (SEQ ID NO: 120) mRNA also is highly expressed in kidney and stomach tumor tissue and to a lesser extent in breast, colon, lung, ovary, and HEPG2 tumor tissues.

[0602] RON (GenBank No. NM_{—}002447 set forth as SEQ ID NO: 159) mRNA is highly expressed in trachea, testis, fetal brain, lung, small intestine, and thymus as well as being expressed in salivary gland, kidney, placenta, heart, prostate, thyroid and to a lesser extent brain, spleen, spinal cord, uterus, fetal liver, adrenal gland, liver, and skeletal muscle. RON mRNA also is expressed in the following tumor tissues: breast, colon, lung, ovary, stomach, HEPG2 and to a lesser extent in kidney and uterus tumor tissue. Soluble RON (SEQ ID NO:128) mRNA is highly expressed in colon and stomach tumor tissues. Soluble RON (SEQ ID NO:128) mRNA is expressed to a lesser extent in trachea, small intestine and thymus as well as in breast, lung, and ovary tumor tissues. Soluble RON (SEQ ID NO:219) mRNA is highly expressed in prostate, trachea, fetal brain, lung, small intestine, thymus as well as breast, colon, lung, ovary, and stomach tumor tissues. Soluble RON (SEQ ID NO:219) mRNA also is expressed to a lesser extent in brain, heart, kidney, placenta, spleen, spinal cord, testis, uterus, fetal liver, adrenal gland, liver, salivary gland, skeletal muscle, thyroid as well as kidney, uterus, MDA435 and HEPG2 tumor tissues. Soluble RON (SEQ ID NO:217) mRNA is highly expressed in trachea, lung, small intestine, thymus as well as breast and colon tumor tissues. Soluble RON (SEQ ID NO:217) mRNA is expressed to a lesser extent in brain, heart, kidney, placenta, prostate, spleen, testis, uterus, fetal brain, salivary gland, thyroid as well as lung, ovary, and stomach tumor tissues.

[0603] TEK (GenBank No. NM_{—}000459 set forth as SEQ ID NO:160) mRNA is highly expressed in heart, kidney, placenta, spleen, lung as well as colon, kidney, lung, and ovary tumor tissues. TEK mRNA also is expressed to a lesser extent in brain, prostate, spinal cord, trachea, testis, uterus, fetal brain, fetal liver, adrenal gland, liver, small intestine, skeletal muscle, thymus, thyroid as well as breast and stomach tumor tissues. Soluble TEK (SEQ ID NO:132) mRNA has low level expression in heart and kidney, as well as colon tumor tissues.

[0604] VEGFR-1 (GenBank No. NM_{—}002019 set forth as SEQ ID NO:157) mRNA is highly expressed in brain, heart, kidney, placenta, prostate, spleen, spinal cord, testis, uterus, fetal brain, fetal liver, adrenal gland, lung, small intestine, skeletal muscle and to a lesser extent in trachea, liver, salivary gland, thymus and thyroid. VEGFR-1 mRNA also is highly expressed in colon, kidney, lung and ovary tumor tissues and to a lesser extent expressed in breast and stomach tumor tissues. Soluble VEGFR-1 (SEQ ID NO:100) mRNA has low level expression in stomach tumor tissues.

[0605] VEGFR-3 (GenBank No. NM_{—}002020 set forth as SEQ ID NO:158) mRNA is highly expressed in heart, kidney, placenta, spleen, fetal brain, fetal liver, lung, small intestine as well as breast, colon, kidney, lung, ovary, stomach and uterus tumor tissues. VEGFR-3 (SEQ ID NO:158) mRNA is to a lesser extent expressed in brain, prostate, spinal cord, trachea, testis, uterus, adrenal gland, liver, salivary gland, skeletal muscle, thymus, thyroid. Soluble VEGFR-3 (SEQ ID NO:225) mRNA is highly expressed in placenta, adrenal gland, lung, small intestine as well as breast, kidney, lung tumor tissues. Soluble VEGFR-3 (SEQ ID NO:225) mRNA also is expressed to a lesser extent in brain, heart, kidney, prostate, spleen, spinal cord, trachea, testis, uterus, fetal brain, fetal liver, liver, salivary gland, skeletal muscle, thymus, and thyroid as well as colon, ovary, stomach, and uterus tumor tissues.

[0606] In summary, expression of mRNA was detectable for all CSR isoforms, but in general was lower than that of the membrane receptor isoforms.

B. Cell Secretion of Soluble Receptors

[0607] Putative CSR isoforms were analyzed in cultured human cells to assess secreted isoforms. Splice variant cDNA molecules encoding candidate CSR isoforms were subcloned into a mammalian expression vector (pcDNA3.1MycHis vector (Invitrogen, Carlsbad, Calif.) fused in frame with the Myc-His tag at the C-terminus of the protein to facilitate their detection.

[0608] Human embryonic kidney 293T cells were seeded at 2×10⁶ cells/well in a 6-well plate and maintained in Dulbecco's modified Eagle's medium and 10% fetal bovine serum (Invitrogen). Cells were transfected using LipofectAMINE 2000 (Invitrogen) following the manufacturer's instructions. On the day of transfection, 5 μg plasmid DNA was mixed with 15 μl of LipofectAMINE 2000 in 0.5 ml of the serum-free DMEM. The mixture was incubated for 20 minutes at room temperature before it was added to the cells. Cells were incubated at 37° C. in a CO₂ incubator for 48 hours. To study the transgene expression, the supernatants were collected and the cells were lysed in PBS buffer containing 0.2% of Triton X-100. Both the cell lysates and the supernatants were assayed for the transgene expression.

[0609] Ni-agarose NTA (Qiagen) was used for purifying His6-tagged proteins under native conditions following the manufacturer's instructions. Purified His6-tagged proteins were eluted and separated on SDS-polyacrylamide gels for immunoblotting using anti-Myc antibodies (both from Invitrogen). Antibodies were diluted 1:5000.

[0610] Expression of the secreted CSR isoforms was detected in cell lysates and conditioned media by Western blot using an anti-Myc antibody (Invitrogen) FGFR-4 (SEQ ID NO: 121), RON (SEQ ID NOS: 129, 216, 218, 220), VEGFR-2 (SEQ ID NO: 224), VEGFR-3 (SEQ ID NO: 127), EphA2 (SEQ ID NO:168), EphA1 (SEQ ID NOS: 153, 149), TEK (SEQ ID NOS: 131, 133), and Tie-1 (SEQ ID NO: 222) protein was detected in cell lysates and Tie-1 (SEQ ID NO: 222), VEGFR-2 (SEQ ID NO: 224), VEGFR-3 (SEQ ID NO: 127) and EphA2 (SEQ ID NO:168) protein was detected in conditioned medium.

C. Receptor Binding

[0611] Co-immunoprecipitation assays were performed to show binding of CSR isoforms and secreted isoforms to their respective membrane anchored fill-length receptors (see, for example, Jin et al. J Biol Chem 2004, 279:1408 and Jin et al. J Biol Chem 2004, 279:14179). Human embryo kidney 293T cells were transiently transfected with the recombinant pcDNA 3.1(MycHis) plasmid expressing soluble VEGFR-3 (as described above). Forty-eight hours after transfection, conditioned medium was collected and binding of VEGF-D was assessed. Conditioned medium (100 μl) from transfected 293T cells was incubated with VEGF-D (100 ng) in the presence or absence of 2 μg of soluble VEGFR-1-Fc or VEGFR-3-Fc (R&D Systems) for one hour. Protein complexes were immunoprecipitated with 0.2 μg/reaction of anti-VEGF-D antibodies (R&D Systems) and separated on a denaturing protein gel probed with anti-Myc antibody. The Western blot showed protein binding between sVEGF3-Myc and VEGF-D. Furthermore, 5× molar excess of a sVEGFR-3-Fc reduced binding whereas the presence of sVEGFR-1-Fc had little to no effect on binding.

D. Proliferation Assays

[0612] A biological activity of CSR isoforms was assessed by measuring their effect on cell proliferation. HUVEC cells (Clonitix) at passage 4 were seeded into DMEM/10% FBS at a density of 4,000 cells/well in a 96-well plate. Cells were treated with or without 0.5 nM of VEGF-A (R&D Systems) in the presence or absence of 2.5 nM of sVEGFR-1-Fc, 2.5 nM of sVEGFR-2-Fc, or 1.6-12.5 nM of the purified sVEGFR2. The treated cells were cultured for 7 days in standard cell culture conditions. Cell proliferation was determined in triplicate samples using CyQuant Fluorescence Assay Kit (Invitrogen Catalog #C7026) according to manufacturer's instructions. 0.5 nM of VEGF-A induced HUVEC proliferation. sVEGFR-1-Fc (2.5 nM) and sVEGFR-2-Fc (2.5 nM) each inhibited VEGFA-induced HUVEC proliferation. Soluble VEGFR-2 (SEQ ID NO: 224) inhibited VEGF-A-induced HUVEC proliferation in a dose-dependent manner.

[0613] Since modifications will be apparent to those of skill in this art, it is intended that this invention be limited only by the scope of the appended claims.

1. An isolated polypeptide, comprising at least one domain of an EphA receptor, wherein the polypeptide comprises an ephrin ligand binding domain and the polypeptide lacks one or more amino acids corresponding to a transmembrane domain of the EphA receptor whereby the membrane localization of the polypeptide is reduced or abolished compared to the EphA receptor.

2. A polypeptide of claim 1, wherein the EphA receptor is selected from the group consisting of EphA1, EphA2, EphA3, EphA4, EphA5, EphA6, EphA7, and EphA8.

3. A polypeptide of claim 2, wherein the EphA receptor comprises a sequence of amino acids set forth in any of SEQ ID NO: 253-260 or is an allelic variant thereof.

4. A polypeptide of claim 3, wherein the allelic variant comprises one or more of the allelic variations set forth in any one of SEQ ID NOS: 289-293.

5. A polypeptide of claim 1, wherein the polypeptide lacks all or part of a protein kinase domain compared to the EphA receptor.

6. A polypeptide of claim 1, wherein the polypeptide lacks all or part of a Sterile Alpha Motif domain (SAM) compared to the EphA receptor.

7. A polypeptide of claim 1, comprising at least one domain of an EphA1 receptor as set forth in SEQ ID NO:253.

8. A polypeptide of claim 7 that comprises an intron-encoded sequence of amino acids, wherein the intron is from a gene encoding the EphA1 receptor.

9. A polypeptide of claim 7, wherein the polypeptide comprises at least one domain of the EphA1 receptor operatively linked to at least one amino acid encoded by an intron of a gene encoding the EphA1 receptor.

10. A polypeptide of claim 7, wherein the polypeptide lacks one or more amino acids of a protein kinase domain of the EphA1 receptor, whereby the kinase activity of the polypeptide is reduced or abolished compared to the EphA1 receptor.

11. A polypeptide of claim 10, wherein the polypeptide has at least 80% sequence identity with a sequence of amino acids set forth in any of SEQ ID NOS: 149, 151 and 153.

12. A polypeptide of claim 11 that comprises the sequence of amino acid set forth in any of SEQ ID NOS: 149, 151 and 153 or is an allelic variant thereof.

13. A polypeptide of claim 12, wherein the allelic variant comprises one or more amino acids of the allelic variations as set forth in SEQ ID NO: 289.

14. A polypeptide of claim 7, wherein the polypeptide contains the same number of amino acids as set forth in any of SEQ ID NOS: 149, 151 and 153.

15. A polypeptide of claim 1, comprising at least one domain of an EphA2 receptor as set forth in SEQ ID NO: 254, wherein the polypeptide lacks one or more amino acids of a transmembrane domain and protein kinase domain compared to the EphA2 receptor, whereby the membrane localization and the protein kinase activity of the polypeptide are reduced or abolished compared to the EphA2 receptor.

16. A polypeptide of claim 15 that comprises an intron-encoded sequence of amino acids, wherein the intron is from a gene encoding an EphA2 receptor.

17. A polypeptide of claim 15, wherein the polypeptide comprises at least one domain of the EphA2 receptor operatively linked to at least one amino acid encoded by an intron of a gene encoding an EphA2 receptor.

18. A polypeptide of claim 15, wherein the polypeptide lacks one or more amino acids of a fibronectin domain compared to the EphA2 receptor.

19. A polypeptide of claim 18, wherein the polypeptide has at least 80% sequence identity with a sequence of amino acids as set forth in SEQ ID NO: 168.

20. A polypeptide of claim 19 that comprises the sequence of amino acids set forth in SEQ ID NO: 168 or an allelic variant thereof.

21. A polypeptide of claim 20, wherein the allelic variant comprises one or more amino acids of the allelic variations as set forth in SEQ ID NO: 290.

22. A polypeptide of claim 15, wherein the polypeptide contains the same number of amino acids as set forth in SEQ ID NO: 168.

23. An isolated polypeptide, comprising at least one domain of an EphB receptor, wherein the polypeptide lacks one or more amino acids of a transmembrane domain compared to the EphB receptor, whereby the membrane localization of the polypeptide is reduced or abolished compared to the EphB receptor.

24. A polypeptide of claim 23, wherein the EphB receptor is selected from the group consisting of EphB1, EphB2, EphB3, EphB4, EphB5, and EphB6.

25. A polypeptide of claim 24, wherein the EphB receptor comprises a sequence of amino acids as set forth in any one of SEQ ID NOS: 261-265 or an allelic variant thereof.

26. A polypeptide of claim 25, wherein the allelic variant comprises one or more of the allelic variations as set forth in any one of SEQ ID NOS: 294-298.

27. A polypeptide of claim 23, wherein the polypeptide lacks one or more amino acids of a protein kinase domain of the EphB receptor, whereby the protein kinase activity of the polypeptide is reduced or abolished compared to the EphB receptor.

28. A polypeptide of claim 23, wherein the polypeptide lacks one or more amino acids of a Sterile Alpha Motif domain (SAM) of the EphB receptor.

29. A polypeptide of claim 23, wherein the polypeptide comprises an ephrin ligand and binding domain.

30. A polypeptide of claim 23, wherein the polypeptide lacks one or more amino acids of a fibronectin domain of the EphB receptor.

31. A polypeptide of claim 23, wherein the polypeptide comprises an intron-encoded sequence of amino acids, wherein the intron is from a gene encoding the EphB receptor.

32. A polypeptide of claim 31, wherein the polypeptide comprises at least one domain of the EphB receptor operatively linked to at least one amino acid encoded by an intron of a gene encoding the EphB receptor.

33. A polypeptide of claim 23, wherein the polypeptide has at least 80% sequence identity with a sequence of amino acids as set forth in any of SEQ ID NOS: 155, 170, 172 and 174.

34. A polypeptide of claim 33 that comprises the sequence of amino acids as set forth in any of SEQ ID NOS: 155, 170, 172 and 174 or an allelic variant thereof.

35. A polypeptide of claim 34, wherein the allelic variant comprises one or more amino acids of the allelic variations as set forth in SEQ ID NOS: 294 or 297.

36. A polypeptide of claim 23, wherein the polypeptide contains the same number of amino acids as set forth in any of SEQ ID NOS: 155, 170, 172 and 174.

37. An isolated polypeptide, comprising at least one domain of an FGFR-1, wherein the polypeptide comprises an immunoglobulin domain corresponding to amino acids 253-357 of the FGFR-1 set forth in SEQ ID NO: 268 and lacks all of a transmembrane domain corresponding to amino acids 375-397 of the FGFR-1.

38. A polypeptide of claim 37 that comprises an intron-encoded sequence of amino acids, wherein the intron is from a gene encoding the FGFR-1.

39. A polypeptide of claim 37, wherein the polypeptide comprises at least one domain of the FGFR-1 operatively linked to at least one amino acid encoded by an intron of a gene encoding an FGFR-1.

40. A polypeptide of claim 37, wherein the polypeptide lacks one or more amino acids of a protein kinase domain of the FGFR-1, whereby the protein kinase activity of the polypeptide is reduced or abolished compared to the FGFR-1.

41. A polypeptide of claim 37, wherein the polypeptide comprises one or more amino acids of an immunoglobulin domain corresponding to amino acids 156-246 of the FGFR-1.

42. A polypeptide of claim 37, wherein the polypeptide has at least 80% sequence identity with a sequence of amino acids set forth in SEQ ID NOS: 119 or 176.

43. A polypeptide of claim 42 that comprises the sequence of amino acids as set forth in any of SEQ ID NOS: 119 and 176 or an allelic variant thereof.

44. A polypeptide of claim 43, wherein the allelic variant comprises one or more amino acids of the allelic variations as set forth in SEQ ID NO: 300.

45. A polypeptide of claim 37, wherein the polypeptide contains the same number of amino acids as set forth in SEQ ID NOS: 119 or 176.

46. An isolated polypeptide, comprising at least one domain of a fibroblast growth factor receptor-2 (FGFR-2), wherein:
the FGFR-2 comprises a sequence of amino acids set forth in SEQ ID NO: 269;
the polypeptide lacks a transmembrane domain and a protein kinase domain compared to the FGFR-2, whereby membrane localization and protein kinase activity of the polypeptide is reduced or abolished compared to the FGFR-2; and
the polypeptide has at least 80% sequence identity with a sequence of amino acids set forth in SEQ ID NOS: 178, 180, 182 and 184.

47. A polypeptide of claim 46 that comprises an intron-encoded sequence of amino acids, wherein the intron is from a gene encoding the FGFR-2.

48. A polypeptide of claim 46, wherein the polypeptide comprises at least one domain of the FGFR-2 operatively linked to at least one amino acid encoded by an intron of a gene encoding the FGFR-2.

49. A polypeptide of claim 46, wherein the polypeptide lacks an immunoglobulin domain corresponding to amino acids 41-125 of the FGFR-2.

50. A polypeptide of claim 46 that comprises the sequence of amino acids set forth in SEQ ID NOS: 178, 180, 182 or 184 or an allelic variant thereof.

51. A polypeptide of claim 50, wherein the allelic variant comprises one or more amino acids of the allelic variations as set forth in SEQ ID NO: 301.

52. A polypeptide of claim 46, wherein the polypeptide contains the same number of amino acids as set forth in any of SEQ ID NOS: 178, 180, 182 and 184.

53. An isolated polypeptide, comprising at least one domain of an FGFR-4, wherein the polypeptide comprises an immunoglobulin domain corresponding to amino acids 249-351 of the FGFR-4 set forth in SEQ ID NO: 271 and lacks a transmembrane domain and a protein kinase domain of the FGFR-4, whereby membrane localization and protein kinase activity of the polypeptide is reduced or abolished compared to the FGFR-4.

54. A polypeptide of claim 53 that comprises an intron-encoded sequence of amino acids, wherein the intron is from a gene encoding the FGFR-4.

55. A polypeptide of claim 53, wherein the polypeptide comprises at least one domain of the FGFR-4 operatively linked to at least one amino acid encoded by an intron of a gene encoding the FGFR-4.

56. A polypeptide of claim 53, wherein the polypeptide has at least 80% sequence identity with a sequence of amino acids set forth in SEQ ID NO: 121.

57. A polypeptide of claim 53, that comprises a sequence of amino acids as set forth in SEQ ID NO: 121 or an allelic variant thereof.

58. A polypeptide of claim 57, wherein the allelic variant comprises one or more amino acids of the allelic variations as set forth in SEQ ID NO: 303.

59. A polypeptide of claim 53, wherein the polypeptide contains the same number of amino acids as set forth in SEQ ID NO: 121.

60. An isolated polypeptide, comprising at least one domain of a DDR1 as set forth in SEQ ID NO: 250, wherein the polypeptide lacks a transmembrane domain and a protein kinase domain compared to the DDR1, whereby membrane localization and protein kinase activity of the polypeptide is reduced or abolished compared to the DDR1, and the polypeptide has at least 80% sequence identity with a sequence of amino acids set forth in SEQ ID NOS: 115 or 117.

61. A polypeptide of claim 60 that comprises an intron-encoded sequence of amino acids, wherein the intron is from a gene encoding the DDR1.

62. A polypeptide of claim 61, wherein the polypeptide comprises at least one domain of the DDR1 operatively linked to at least one amino acid encoded by an intron of a gene encoding the DDR1.

63. A polypeptide of claim 60, that comprises the sequence of amino acids set forth in SEQ ID NOS: 115 or 117 or an allelic variant thereof.

64. A polypeptide of claim 63, wherein the allelic variant comprises one or more amino acids of the allelic variations as set forth in SEQ ID NO: 286.

65. A polypeptide of claim 60, wherein the polypeptide contains the same number of amino acids as set forth in SEQ ID NOS: 115 or 117.

66. An isolated polypeptide, comprising at least one domain of a MET receptor, wherein:
the polypeptide lacks a transmembrane domain, a protein kinase domain and at least one additional domain compared to the MET receptor as set forth in SEQ ID NO: 274, whereby membrane localization and protein kinase activity of the polypeptide is reduced or abolished compared to the MET receptor.

67. A polypeptide of claim 66 that comprises an intron-encoded sequence of amino acids, wherein the intron is from a gene encoding a MET receptor.

68. A polypeptide of claim 66, wherein the polypeptide comprises at least one domain of the MET receptor operatively linked to at least one amino acid encoded by an intron of a gene encoding a MET receptor.

69. A polypeptide of claim 66, wherein the additional domain is selected from the group consisting of a Sema domain, a plexin domain and an IPT/TIG domain.

70. A polypeptide of claim 66, wherein the polypeptide has at least 80% sequence identity with a sequence of amino acids as set forth in any of SEQ ID NOS: 186, 188, 190, 192, 194, 196, 198, 200, 202, 204, 206, 208, and 214.

71. A polypeptide of claim 66, that comprises a sequence of amino acids set forth in any of SEQ ID NOS: 186, 188, 190, 192, 194, 196, 198, 200, 202, 204, 206, 208, and 214 or an allelic variant thereof.

72. A polypeptide of claim 71, wherein the allelic variant comprises one or more amino acids of the allelic variations as set forth in SEQ ID NO: 306.

73. A polypeptide of claim 66, wherein the polypeptide contains the same number of amino acids as set forth in any of SEQ ID NOS: 186, 188, 190, 192, 194, 196, 198, 200, 202, 204, 206, 208 and 214.

74. An isolated polypeptide, comprising at least one domain of a RON receptor, wherein:
the polypeptide comprises a plexin domain of the RON receptor as set forth in SEQ ID NO: 277; and
the polypeptide lacks a transmembrane domain of the RON receptor, whereby membrane localization of the polypeptide is reduced or abolished compared to the RON receptor.

75. A polypeptide of claim 74 that comprises an intron-encoded sequence of amino acids, wherein the intron is from a gene encoding the RON receptor.

76. A polypeptide of claim 74, wherein the polypeptide comprises at least one domain of the RON receptor operatively linked to at least one amino acid encoded by an intron of a gene encoding a RON receptor.

77. A polypeptide of claim 74, wherein the polypeptide lacks one or more amino acids of a protein kinase domain compared to the RON receptor as set forth in SEQ ID NO: 277, whereby protein kinase activity of the polypeptide is reduced or abolished compared to the RON receptor.

78. A polypeptide of claim 74, wherein the polypeptide comprises one or more amino acids of at least one IPT/TIG domain of the RON receptor.

79. A polypeptide of claim 74, wherein the polypeptide has at least 80% sequence identity with a sequence of amino acids as set forth in any of SEQ ID NOS: 216, 218 and 220.

80. A polypeptide of claim 74, that comprises a sequence of amino acids set forth in any of SEQ ID NOS: 216, 218 and 220 or an allelic variant thereof.

81. A polypeptide of claim 80, wherein the allelic variant comprises one or more amino acids of the allelic variations as set forth in SEQ ID NO: 308.

82. A polypeptide of claim 74, wherein the polypeptide contains the same number of amino acids as set forth in any of SEQ ID NOS: 216, 218 and 220.

83. An isolated polypeptide, comprising at least one domain of a TEK receptor as set forth in SEQ ID NO: 278, wherein:
the polypeptide lacks a transmembrane domain, and a protein kinase domain whereby membrane localization and protein kinase activity of the polypeptide are reduced or abolished compared to the TEK receptor; and
the polypeptide lacks one or more amino acids of at least one fibronectin domain compared to the TEK receptor.

84. A polypeptide of claim 83 that comprises an intron-encoded sequence of amino acids, wherein the intron is from a gene encoding the TEK receptor.

85. A polypeptide of claim 83, wherein the polypeptide comprises at least one domain of the TEK receptor operatively linked to at least one amino acid encoded by an intron of a gene encoding the TEK receptor.

86. A polypeptide of claim 83, wherein the fibronectin domain lacking in the polypeptide corresponds to amino acids 444-529, 543-626, or 639-724 of SEQ ID NO: 278.

87. A polypeptide of claim 83, wherein the polypeptide lacks one or more amino acids of the three fibronectin domains of the TEK receptor corresponding to amino acids 444-529, 543-626, and 639-724 of SEQ ID NO: 278.

88. A polypeptide of claim 83, wherein the polypeptide has at least 80% sequence identity with a sequence of amino acids as set forth in any of SEQ ID NOS: 131 and 133.

89. A polypeptide of claim 83, that comprises a sequence of amino acids set forth in any of SEQ ID NOS: 131 and 133 or an allelic variant thereof.

90. A polypeptide of claim 89, wherein the allelic variant comprises one or more amino acids of the allelic variations as set forth in SEQ ID NO: 309.

91. A polypeptide of claim 83, wherein the polypeptide contains the same number of amino acids as set forth in any of SEQ ID NOS: 131 and 133.

92. An isolated polypeptide, comprising all or part of at least one domain of a Tie-1 receptor as set forth in SEQ ID NO: 279, wherein:
the polypeptide lacks a transmembrane domain and a protein kinase domain compared to the Tie-1 receptor, whereby membrane localization and protein kinase activity of the polypeptide are reduced or abolished compared to the Tie-1 receptor; and
the polypeptide comprises a sequence of amino acids set forth in any of SEQ ID NOS: 135, 137, 139, 141, 143 and 222 or an allelic variant thereof.

93. A polypeptide of claim 92, wherein the allelic variant comprises one or more amino acids of the allelic variations as set forth in SEQ ID NO: 310.

94. A polypeptide of claim 92, wherein the polypeptide contains the same number of amino acids as set forth in any of SEQ ID NOS: 135, 137, 139, 141, 143 and 222.

95. An isolated polypeptide, wherein:
the polypeptide comprises a sequence of amino acids that has at least 80% sequence identity with a sequence of amino acids as set forth in SEQ ID NO: 123; and
the polypeptide lacks a transmembrane domain and a protein kinase domain compared to a VEGFR-1 receptor set forth in SEQ ID NO: 282.

96. A polypeptide of claim 95, that comprises the sequence of amino acids set forth in SEQ ID NO: 123 or an allelic variant thereof.

97. A polypeptide of claim 95, wherein the polypeptide contains the same number of amino acids as set forth in SEQ ID NO: 123.

98. An isolated polypeptide, comprising at least one domain of a VEGFR set forth in any of SEQ ID NOS: 283 and 284, wherein the polypeptide lacks one or more amino acids of a transmembrane domain of the VEGFR, whereby membrane localization of the polypeptide is reduced or abolished compared to the VEGFR.

99. A polypeptide of claim 98 that comprises an intron-encoded sequence of amino acids, wherein the intron is from a gene encoding the VEGFR.

100. A polypeptide of claim 99, wherein the polypeptide comprises at least one domain of the VEGFR operatively linked to at least one amino acid encoded by an intron of a gene encoding the VEGFR.

101. A polypeptide of claim 98, wherein the polypeptide lacks one or more amino acids of a protein kinase domain, whereby protein kinase activity of the polypeptide is reduced or abolished compared to the VEGFR.

102. A polypeptide of claim 98, wherein the polypeptide lacks one or more amino acids of an immunoglobulin domain compared to the VEGFR.

103. A polypeptide of claim 102, wherein the polypeptide has at least 80% sequence identity with a sequence of amino acids as set forth in any of SEQ ID NOS: 125, 127, 224 and 226.

104. A polypeptide of claim 98, that comprises a sequence of amino acids set forth in any of SEQ ID NOS: 125, 127, 224 and 226 or an allelic variant thereof.

105. A polypeptide of claim 104, wherein the allelic variant comprises one or more amino acids of the allelic variations as set forth in SEQ ID NOS: 313 or 314.

106. A polypeptide of claim 98, wherein the polypeptide contains the same number of amino acids as set forth in any of SEQ ID NOS: 125, 127, 224 and 226.

107. An isolated polypeptide, comprising at least one domain of a PDGFR-B as set forth in SEQ ID NO: 276, wherein the polypeptide lacks one or more amino acids of a transmembrane domain of the PDGFR-B, whereby membrane localization of the polypeptide is reduced or abolished compared to the PDGFR-B.

108. A polypeptide of claim 107, that comprises an intron-encoded sequence of amino acids, wherein the intron is from a gene encoding the PDGFR-B.

109. A polypeptide of claim 107, wherein the polypeptide comprises at least one domain of the PDGFR-B operatively linked to at least one amino acid encoded by an intron of a gene encoding the PDGFR-B.

110. A polypeptide of claim 107, wherein the polypeptide lacks one or more amino acids of a protein kinase domain of the PDGFR-B, whereby protein kinase activity of the polypeptide is reduced or abolished compared to the PDGFR-B.

111. A polypeptide of claim 107, wherein the polypeptide comprises one or more amino acids of an immunoglobulin domain of the PDGFR-B.

112. A polypeptide of claim 107, wherein the polypeptide has at least 80% sequence identity with a sequence of amino acids set forth in SEQ ID NO: 147.

113. A polypeptide of claim 107, that comprises a sequence of amino acids set forth in SEQ ID NO: 147 or an allelic variant thereof.

114. A polypeptide of claim 113, wherein the allelic variant comprises one or more amino acids of the allelic variations as set forth in SEQ ID NO: 307.

115. A polypeptide of claim 107, wherein the polypeptide contains the same number of amino acids as set forth in SEQ ID NO: 147.

116. An isolated polypeptide, comprising at least one domain of a CSF1R as set forth in SEQ ID NO: 249, wherein the polypeptide lacks one or more amino acids of a transmembrane domain of the CSF1R, whereby membrane localization of the polypeptide is reduced or abolished compared to the CSF1R.

117. A polypeptide of claim 116, that comprises an intron-encoded sequence of amino acids, wherein the intron is from a gene encoding the CSF1R.

118. A polypeptide of claim 117, wherein the polypeptide comprises at least one domain of the CSF1R operatively linked to at least one amino acid encoded by an intron of a gene encoding the CSF1R.

119. A polypeptide of claim 116, wherein the polypeptide lacks one or more amino acids of a protein kinase domain of the CSF1R, whereby protein kinase activity of the polypeptide is reduced or abolished compared to the CSF1R.

120. A polypeptide of claim 116, wherein the polypeptide comprises one or more amino acids of an immunoglobulin domain of the CSF1R.

121. A polypeptide of claim 116, wherein the polypeptide has at least 80% sequence identity with a sequence of amino acids set forth in SEQ ID NO: 145.

122. A polypeptide of claim 116, that comprises a sequence of amino acids set forth in SEQ ID NO: 145 or an allelic variant thereof.

123. A polypeptide of claim 122, wherein the allelic variant comprises one or more amino acids of the allelic variations as set forth in SEQ ID NO: 285.

124. A polypeptide of claim 116, wherein the polypeptide contains the same number of amino acids as set forth in SEQ ID NO: 145.

125. An isolated polypeptide, comprising at least one domain of a KIT receptor as set forth in SEQ ID NO:273, wherein the polypeptide lacks one or more amino acids of a transmembrane domain and a protein kinase domain of the KIT receptor, whereby membrane localization and protein kinase activity of the polypeptide are reduced or abolished compared to the KIT receptor.

126. A polypeptide of claim 125, that comprises an intron-encoded sequence of amino acids, wherein the intron is from a gene encoding the KIT receptor.

127. A polypeptide of claim 125, wherein the polypeptide comprises at least one domain of the KIT receptor operatively linked to at least one amino acid encoded by an intron of a gene encoding a KIT receptor.

128. A polypeptide of claim 125, wherein the polypeptide comprises at least one immunoglobulin domain of the KIT receptor.

129. A polypeptide of claim 125, wherein the polypeptide has at least 80% sequence identity with a sequence of amino acids set forth in SEQ ID NO: 93.

130. A polypeptide of claim 125, that comprises a sequence of amino acids set forth in SEQ ID NO: 93 or an allelic variant thereof.

131. A polypeptide of claim 130, wherein the allelic variant comprises one or more amino acids of the allelic variations as set forth in SEQ ID NO: 305.

132. A polypeptide of claim 125, wherein the polypeptide contains the same number of amino acids as set forth in SEQ ID NO: 93.

133. An isolated polypeptide, comprising at least one cysteine rich c6 domain of a TNFR as set forth in SEQ ID NOS: 280 or 281, wherein the polypeptide lacks all of a transmembrane domain of the TNFR, whereby membrane localization of the polypeptide is reduced or abolished compared to the TNFR.

134. A polypeptide of claim 133, that comprises an intron-encoded sequence of amino acids, wherein the intron is from a gene encoding the TNFR.

135. A polypeptide of claim 133, wherein the polypeptide comprises at least one domain of the TNFR operatively linked to at least one amino acid encoded by an intron of a gene encoding the TNFR.

136. A polypeptide of claim 133, wherein the polypeptide comprises at least two cysteine rich c6 domains of the TNFR.

137. A polypeptide of claim 133, wherein the polypeptide has at least 80% sequence identity with a sequence of amino acids set forth in SEQ ID NO: 95.

138. A polypeptide of claim 133, that comprises a sequence of amino acids set forth in SEQ ID NO: 95 or an allelic variant thereof.

139. A polypeptide of claim 138, wherein the allelic variant comprises one or more amino acids of the allelic variations as set forth in SEQ ID NO: 312.

140. A polypeptide of claim 133, wherein the polypeptide contains the same number of amino acids as set forth in SEQ ID NO: 95.

141. A pharmaceutical composition, comprising a polypeptide isoform that lacks a transmembrane domain and at least or part of at least one other domain of a receptor selected from among a EphA, EphB, FGFR-1, FGFR-2, FGFR-4, DDR1, MET, RON, TEK, Tie-1, VEGFR, PDGFR-B, CSF1R, KIT, and TNFR, wherein the polypeptide modulates an activity or function of its cognate receptor.

142. The pharmaceutical composition of claim 141, wherein the polypeptide is selected from among:
(a) an isolated polypeptide, comprising a sequence of amino acids set forth in any one of SEQ ID NOS: 91, 93, 95, 115, 117, 119, 121, 123, 125, 127, 129, 131, 133, 135, 137, 139, 141, 143, 145, 147, 149, 151, 153, 155, 168, 170, 172, 174, 176, 178, 180, 182, 184, 186, 188, 190, 192, 194, 196, 198, 200, 202, 204, 206, 208, 210, 212, 214, 216, 218, 220, 222, 224 and 226;
(b) an isolated polypeptide consisting essentially of a sequence of amino acids set forth in any one of SEQ ID NOS: 91, 93, 95, 115, 117, 119, 121, 123, 125, 127, 129, 131, 133, 135, 137, 139, 141, 143, 145, 147, 149, 151, 153, 155, 168, 170, 172, 174, 176, 178, 180, 182, 184, 186, 188, 190, 192, 194, 196, 198, 200, 202, 204, 206, 208, 210, 212, 214, 216, 218, 220, 222, 224 and 226;
(c) an isolated polypeptide, comprising a sequence of amino acids that has at least 80% sequence identity with a sequence of amino acids set forth in any of SEQ ID NOS: 91, 93, 95, 115, 117, 119, 121, 123, 125, 127, 129, 131, 133, 135, 137, 139, 141, 143, 145, 147, 149, 151, 153 and 155 or an allelic variant thereof, wherein:
sequence identity is compared along the full length of each SEQ ID to the full length sequence of the isolated polypeptide; and
each of SEQ ID NOS: 91, 93, 95, 115, 117, 119, 121, 123, 125, 127, 129, 131, 133, 135, 137, 139, 141, 143, 145, 147, 149, 151, 153 and 155 is a cell surface receptor isoform; and
(d) an isolated polypeptide, comprising a sequence of amino acids set forth in any of SEQ ID NOS: 91, 93, 95, 115, 117, 119, 121, 123, 125, 127, 129, 131, 133, 135, 137, 139, 141, 143, 145, 147, 149, 151, 153 and 155.

143. The composition of claim 141, wherein the activity modulated by the polypeptide is one or more of: dimerization, homodimerization, heterodimerization, trimerization, kinase activity, receptor-associated kinase activity, receptor-associated protease activity, autophosphorylation of the receptor, transphosphorylation of the receptor, phosphorylation of a signal transduction molecule, ligand binding, competition with the receptor for ligand binding, signal transduction, interaction with a signal transduction molecule, induction of apoptosis, membrane association and membrane localization.

144. The composition of claim 143, wherein modulation is an inhibition of activity.

145. An isolated nucleic acid molecule, comprising a sequence of nucleic acids set forth in any of SEQ ID NOS: 90, 92, 94, 114, 116, 118, 120, 122, 124, 126, 128, 130, 132, 134, 136, 138, 140, 142, 144, 146, 148, 150, 152, 154, 167, 169, 171, 173, 175, 177, 179, 181, 183, 185, 187, 189, 191, 193, 195, 197, 199, 201, 203, 205, 207, 209, 211, 213, 215, 217, 219, 221, 223 and 225 or an allelic variant thereof; or
an isolated nucleic acid molecule, comprising a sequence of nucleotides that has at least 90% sequence identity with a sequence of nucleotides set forth in any of SEQ ID NOS: 90, 92, 94, 114, 116, 118, 120, 122, 124, 126, 128, 130, 132, 134, 136, 138, 140, 142, 144, 146, 148, 150, 152 and 154 or an allelic variations variant thereof, wherein:
sequence identity is compared along the full length of each SEQ ID to the full length sequence of the isolated nucleic acid molecule; and
each of SEQ ID NOS: 90, 92, 94, 114, 116, 118, 120, 122, 124, 126, 128, 130, 132, 134, 136, 138, 140, 142, 144, 146, 148, 150, 152 and 154 is a cell surface receptor isoform.

146. A vector, comprising the nucleic acid molecule of claim 145.

147. A cell, comprising the vector of claim 146.

148. A method of treating a disease or condition comprising, administering a pharmaceutical composition of claim 141.

149. An isolated polypeptide, wherein the polypeptide is selected from among:
(a) an isolated polypeptide that comprise comprising a sequence of amino acids set forth in any one of SEQ ID NOS: 91, 93, 95, 115, 117, 119, 121, 123, 125, 127, 129, 131, 133, 135, 137, 139, 141, 143, 145, 147, 149, 151, 153, 155, 168, 170, 172, 174, 176, 178, 180, 182, 184, 186, 188, 190, 192, 194, 196, 198, 200, 202, 204, 206, 208, 210, 212, 214, 216, 218, 220, 222, 224 and 226;
(b) an isolated polypeptide consisting essentially of a sequence of amino acids set forth in any one of SEQ ID NOS: 91, 93, 95, 115, 117, 119, 121, 123, 125, 127, 129, 131, 133, 135, 137, 139, 141, 143, 145, 147, 149, 151, 153, 155, 168, 170, 172, 174, 176, 178, 180, 182, 184, 186, 188, 190, 192, 194, 196, 198, 200, 202, 204, 206, 208, 210, 212, 214, 216, 218, 220, 222, 224 and 226;
(c) an isolated polypeptide comprising a sequence of amino acids that has at least 80% sequence identity with a sequence of amino acids set forth in any of SEQ ID NOS: 91, 93, 95, 115, 117, 119, 121, 123, 125, 127, 129, 131, 133, 135, 137, 139, 141, 143, 145, 147, 149, 151, 153 and 155 or an allelic variant thereof, wherein:
sequence identity is compared along the full length of each SEQ ID to the full length sequence of the isolated polypeptide; and
each of SEQ ID NOS: 91, 93, 95, 115, 117, 119, 121, 123, 125, 127, 129, 131, 133, 135, 137, 139, 141, 143, 145, 147, 149, 151, 153 and 155 is a cell surface receptor isoform; and
(d) an isolated polypeptide, comprising a sequence of amino acids set forth in any of SEQ ID NOS: 91, 93, 95, 115, 117, 119, 121, 123, 125, 127, 129, 131, 133, 135, 137, 139, 141, 143, 145, 147, 149, 151, 153 and 155.

150. An isolated polypeptide of claim 149, wherein the polypeptide occurs in a mammal.

151. An isolated polypeptide of claim 150, wherein the mammal is a rodent, a primate or a human.

152. An isolated polypeptide, comprising at least one domain of a cell surface receptor operatively linked to at least one amino acid encoded by an intron of a gene encoding the cell surface receptor;
wherein the cell surface receptor is selected from the group consisting of a DDR1, KIT, FGFR-1, FGFR-4, TNFR2, VEGFR-1, VEGFR-3, RON, TEK, Tie-1, CSF1R, PDGFR-B, EphA1, and EphB1; or wherein the polypeptide comprises a sequence of amino acids selected from the group consisting of SEQ ID NOS: 91, 93, 95, 115, 117, 119, 121, 123, 125, 127, 129, 131, 133, 135, 137, 139, 141, 143, 145, 147, 149, 151, 153 and 155.

153. An isolated polypeptide, comprising a shortened cell surface receptor lacking at least all or part of a transmembrane domain, wherein:
the polypeptide is not membrane localized;
the polypeptide modulates an activity of the cell surface receptor;
the cell surface receptor is selected from the group consisting of a DDR1, KIT, FGFR-1, FGFR-4, TNFR2, VEGFR-1, VEGFR-3, RON, TEK, Tie-1, CSF1R, PDGFR-B, EphA1, and EphB1, or the isolated polypeptide has at least 80% sequence identity with a sequence of amino acids set forth in any of SEQ ID NOS: 91, 93, 95, 115, 117, 119, 121, 123, 125, 127, 129, 131, 133, 135, 137, 139, 141, 143, 145, 147, 149, 151, 153 and 155; and
sequence identity is compared along the full length of each SEQ ID to the sequence of the full length of the isolated polypeptide.

154. An isolated polypeptide of claim 153, wherein the cell surface receptor further lacks a cell surface receptor cytoplasmic domain.

155. An isolated polypeptide, comprising an intron-encoded sequence of amino acids, wherein:
the intron is from a cell surface receptor gene selected from the group consisting of a KIT, FGFR-4, TNFR, VEGFR-1, RON, TEK, Tie-1 and EphA1; or
the intron-encoded sequence is of any of SEQ ID NOS: 91, 93, 95, 121, 123, 129, 131, 133, 135, 137, 139, 141, 149, 151 and 153;
the polypeptide lacks a cell surface receptor cytoplasmic domain; and
the polypeptide further lacks a transmembrane domain.

156. A combination comprising:
two and one or more different cell surface receptor isoforms and/or a therapeutic drug or a cell surface receptor isoform and a therapeutic drug.

157. An isolated polypeptide of claim 155, wherein the polypeptide comprises a TNFR isoform selected from among a TNFR1, TNFR2, TNFRrp, low-affinity nerve growth factor receptor, Fas antigen, CD40, CD27, CD30, 4-1BB, OX40, DR3, DR4, DR5 and herpesvirus entry mediator (HVEM).

158. A method of regulating development and/or disease states, comprising contacting cells or tissues in vitro or in vivo with a cell surface receptor isoform (CSR) that lacks one or more domains or activities of the CSR, wherein the CSR is involved in angiogenesis or development.

159. The method of claim 158, wherein the CSR is an intron fusion protein.

160. A chimeric polypeptide, comprising a portion of one cell surface receptor (CSR) isoform and a portion of a second, different CSR isoform, wherein:
the chimeric polypeptide modulates an activity of one or more receptor tyrosine kinases; and
each portion contains at least 4, 5, 6, 7, 8, 10, 12, 15, or more amino acid residues.

161. A polypeptide of claim 160, wherein the first portion comprises all or part of an extracellular domain of a cell surface receptor; and the second portion comprises an intron-encoded portion from an intron fusion protein.

162. A polypeptide of claim 161, wherein the intron-encoded portion is a herstatin intron-encoded portion.

163. A polypeptide of claim 162, wherein the intron-encoded portion is set forth in any of SEQ ID NOS: 320-345.

164. An isolated polypeptide, comprising a cell surface receptor isoform, wherein:
the polypeptide is an intron fusion protein that contains at least one amino acid encoded by an intron of a gene encoding a polypeptide receptor isoform selected from among isoforms of FGFR-4, KIT, TNFRs, DDR1, FGFR-1, VEGFR-2, VEGFR-3, RON, TEK, CSF1R, PDGFR-B, EphA, EphB and MET; and the polypeptide does not contain a transmembrane domain or does not contain a sufficient portion of a transmembrane domain to anchor the polypeptide on a cell.

165. An isolated polypeptide of claim 164 that is a receptor antagonist.

166. A conjugate, comprising: a first portion linked directly or via a linker to an intron-encoded portion of an intron fusion polypeptide, wherein the resulting polypeptide modulates an activity of a cell surface receptor.

167. The conjugate of claim 166, wherein:
the first portion comprises all or portion of an extracellular domain of a first cell surface receptor (CSR);
the first portion is sufficient to mediate interaction with a ligand or with a second CSR; and
the first and second CSR are the same or different.

168. The conjugate of claim 167, wherein one or both CSRs is a receptor tyrosine kinase.

169. The conjugate of claim 166, wherein:
the first portion is from a herstatin if the intron-encoded portion is from herstatin.

170. A method of preparing a synthetic intron fusion protein, comprising:
linking an N-terminus of one cell surface receptor (CSR) isoform to an intron from an intron fusion protein, whereby the resulting fusion protein modulates an activity of a cell surface receptor.

171. The method of claim 170, wherein the linkage is covalent.

172. The combination of claim 156, wherein the isoforms and/or drugs are in separate compositions or in a single composition.

173. A method of treatment, comprising administering the components of the combination of claim 156, wherein each component is administered separately, simultaneously, intermittently, in a single composition or combinations thereof.

The application's sequence listing, which the Patent Office published only in electronic form, follows.

SEQUENCE LISTING (359 sequences)

SEQ ID NO: 1 - DNA, 5084 bp, Homo Sapiens
  ref <308>: DATABASE ACCESSION NUMBER: GenBank No. NM_00022
  ref <309>: DATABASE ENTRY DATE: 2003-12-20
gatcccatcgcagctaccgcgatgagaggcgctcgcggcgcctgggattttctctgcgttctgctcctactgcttcgcgtccagacaggctcttctcaaccatctgtgagtccaggggaaccgtctccaccatccatccatccaggaaaatcagacttaatagtccgcgtgggcgacgagattaggctgttatgcactgatccgggctttgtcaaatggacttttgagatcctggatgaaacgaatgagaataagcagaatgaatggatcacggaaaaggcagaagccaccaacaccggcaaatacacgtgcaccaacaaacacggcttaagcaattccatttatgtgtttgttagagatcctgccaagcttttccttgttgaccgctccttgtatgggaaagaagacaacgacacgctggtccgctgtcctctcacagacccagaagtgaccaattattccctcaaggggtgccaggggaagcctcttcccaaggacttgaggtttattcctgaccccaaggcgggcatcatgatcaaaagtgtgaaacgcgcctaccatcggctctgtctgcattgttctgtggaccaggagggcaagtcagtgctgtcggaaaaattcatcctgaaagtgaggccagccttcaaagctgtgcctgttgtgtctgtgtccaaagcaagctatcttcttagggaaggggaagaattcacagtgacgtgcacaataaaagatgtgtctagttctgtgtactcaacgtggaaaagagaaaacagtcagactaaactacaggagaaatataatagctggcatcacggtgacttcaattatgaacgtcaggcaacgttgactatcagttcagcgagagttaatgattctggagtgttcatgtgttatgccaataatacttttggatcagcaaatgtcacaacaaccttggaagtagtagataaaggattcattaatatcttccccatgataaacactacagtatttgtaaacgatggagaaaatgtagatttgattgttgaatatgaagcattccccaaacctgaacaccagcagtggatctatatgaacagaaccttcactgataaatgggaagattatcccaagtctgagaatgaaagtaatatcagatacgtaagtgaacttcatctaacgagattaaaaggcaccgaaggaggcacttacacattcctagtgtccaattctgacgtcaatgctgccatagcatttaatgtttatgtgaatacaaaaccagaaatcctgacttacgacaggctcgtgaatggcatgctccaatgtgtggcagcaggattcccagagcccacaatagattggtatttttgtccaggaactgagcagagatgctctgcttctgtactgccagtggatgtgcagacactaaactcatctgggccaccgtttggaaagctagtggttcagagttctatagattctagtgcattcaagcacaatggcacggttgaatgtaaggcttacaacgatgtgggcaagacttctgcctattttaactttgcatttaaaggtaacaacaaagagcaaatccatccccacaccctgttcactcctttgctgattggtttcgtaatcgtagctggcatgatgtgcattattgtgatgattctgacctacaaatatttacagaaacccatgtatgaagtacagtggaaggttgttgaggagataaatggaaacaattatgtttacatagacccaacacaacttccttatgatcacaaatgggagtttcccagaaacaggctgagttttgggaaaaccctgggtgctggagctttcgggaaggttgttgaggcaactgcttatggcttaattaagtcagatgcggccatgactgtcgctgtaaagatgctcaagccgagtgcccatttgacagaacgggaagccctcatgtctgaactcaaagtcctgagttaccttggtaatcacatgaatattgtgaatctacttggagcctgcaccattggagggcccaccctggtcattacagaatattgttgctatggtgatcttttgaattttttgagaagaaaacgtgattcatttatttgttcaaagcaggaagatcatgcagaagctgcactttataagaatcttctgcattcaaaggagtcttcctgcagcgatagtactaatgagtacatggacatgaaacctggagtttcttatgttgtcccaaccaaggccgacaaaaggagatctgtgagaataggctcatacatagaaagagatgtgactcccgccatcatggaggatgacgagttggccctagacttagaagacttgctgagcttttcttaccaggtggcaaagggcatggctttcctcgcctccaagaattgtattcacagagacttggcagccagaaatatcctccttactcatggtcggatcacaaagatttgtgattttggtctagccagagacatcaagaatgattctaattatgtggttaaaggaaacgctcgactacctgtgaagtggatggcacctgaaagcattttcaactgtgtatacacgtttgaaagtgacgtctggtcctatgggatttttctttgggagctgttctctttaggaagcagcccctatcctggaatgccggtcgattctaagttctacaagatgatcaaggaaggcttccggatgctcagccctgaacacgcacctgctgaaatgtatgacataatgaagacttgctgggatgcagatcccctaaaaagaccaacattcaagcaaattgttcagctaattgagaagcagatttcagagagcaccaatcatatttactccaacttagcaaactgcagccccaaccgacagaagcccgtggtagaccattctgtgcggatcaattctgtcggcagcaccgcttcctcctcccagcctctgcttgtgcacgacgatgtctgagcagaatcagtgtttgggtcacccctccaggaatgatctcttcttttggcttccatgatggttattttcttttctttcaacttgcatccaactccaggatagtgggcaccccactgcaatcctgtctttctgagcacactttagtggccgatgatttttgtcatcagccaccatcctattgcaaaggttccaactgtatatattcccaatagcaacgtagcttctaccatgaacagaaaacattctgatttggaaaaagagagggaggtatggactgggggccagagtcctttccaaggcttctccaattctgcccaaaaatatggttgatagtttacctgaataaatggtagtaatcacagttggccttcagaaccatccatagtagtatgatgatacaagattagaagctgaaaacctaagtcctttatgtggaaaacagaacatcattagaacaaaggacagagtatgaacacctgggcttaagaaatctagtatttcatgctgggaatgagacataggccatgaaaaaaatgatccccaagtgtgaacaaaagatgctcttctgtggaccactgcatgagcttttatactaccgacctggtttttaaatagagtttgctattagagcattgaattggagagaaggcctccctagccagcacttgtatatacgcatctataaattgtccgtgttcatacatttgaggggaaaacaccataaggtttcgtttctgtatacaaccctggcattatgtccactgtgtatagaagtagattaagagccatataagtttgaaggaaacagttaataccattttttaaggaaacaatataaccacaaagcacagtttgaacaaaatctcctcttttagctgatgaacttattctgtagattctgtggaacaagcctatcagcttcagaatggcattgtactcaatggatttgatgctgtttgacaaagttactgattcactgcatggctcccacaggagtgggaaaacactgccatcttagtttggattcttatgtagcaggaaataaagtataggtttagcctccttcgcaggcatgtcctggacaccgggccagtatctatatatgtgtatgtacgtttgtatgtgtgtagacaaatatttggaggggtatttttgccctgagtccaagagggtcctttagtacctgaaaagtaacttggctttcattattagtactgctcttgtttcttttcacatagctgtctagagtagcttaccagaagcttccatagtggtgcagaggaagtggaaggcatcagtccctatgtatttgcagttcacctgcacttaaggcactctgttatttagactcatcttactgtacctgttccttagaccttccataatgctactgtctcactgaaacatttaaattttaccctttagactgtagcctggatattattcttgtagtttacctctttaaaaacaaaacaaaacaaaacaaaaaactccccttcctcactgcccaatataaaaggcaaatgtgtacatggcagagtttgtgtgttgtcttgaaagattcaggtatgttgcctttatggtttcccccttctacatttcttagactacatttagagaactgtggccgttatctggaagtaaccatttgcactggagttctatgctctcgcacctttccaaagttaacagattttggggttgtgttgtcacccaagagattgttgtttgccatactttgtctgaaaaattcctttgtgtttctattgacttcaatgatagtaagaaaagtggttgttagttatagatgtctaggtacttcaggggcacttcattgagagttttgtcttgccatactttgtctgaaaaattcctttgtgtttctattgacttcaatgatagtaagaaaagtggttgttagttatagatgtctaggtacttcaggggcacttcattgagagttttgtcaatgtcttttgaatattcccaagcccatgagtccttgaaaatattttttatatatacagtaactttatgtgtaaatacataagcggcgtaagtttaaaggatgttggtgttccacgtgttttattcctgtatgttgtccaattgttgacagttctgaagaattc

SEQ ID NO: 2 - DNA, 3015 bp, Homo Sapiens
  ref <308>: DATABASE ACCESSION NUMBER: GenBank NM_002011
  ref <309>: DATABASE ENTRY DATE: 2004-05-20
ccgaggagcgctcgggctgtctgcggaccctgccgcgtgcaggggtcgcggccggctggagctgggagtgaggcggcggaggagccaggtgaggaggagccaggaaggcagttggtgggaagtccagcttgggtccctgagagctgtgagaaggagatgcggctgctgctggccctgttgggggtcctgctgagtgtgcctgggcctccagtcttgtccctggaggcctctgaggaagtggagcttgagccctgcctggctcccagcctggagcagcaagagcaggagctgacagtagcccttgggcagcctgtgcggctgtgctgtgggcgggctgagcgtggtggccactggtacaaggagggcagtcgcctggcacctgctggccgtgtacggggctggaggggccgcctagagattgccagcttcctacctgaggatgctggccgctacctctgcctggcacgaggctccatgatcgtcctgcagaatctcaccttgattacaggtgactccttgacctccagcaacgatgatgaggaccccaagtcccatagggacctctcgaataggcacagttacccccagcaagcaccctactggacacacccccagcgcatggagaagaaactgcatgcagtacctgcggggaacaccgtcaagttccgctgtccagctgcaggcaaccccacgcccaccatccgctggcttaaggatggacaggcctttcatggggagaaccgcattggaggcattcggctgcgccatcagcactggagtctcgtgatggagagcgtggtgccctcggaccgcggcacatacacctgcctggtagagaacgctgtgggcagcatccgctataactacctgctagatgtgctggagcggtccccgcaccggcccatcctgcaggccgggctcccggccaacaccacagccgtggtgggcagcgacgtggagctgctgtgcaaggtgtacagcgatgcccagccccacatccagtggctgaagcacatcgtcatcaacggcagcagcttcggagccgacggtttcccctatgtgcaagtcctaaagactgcagacatcaatagctcagaggtggaggtcctgtacctgcggaacgtgtcagccgaggacgcaggcgagtacacctgcctcgcaggcaattccatcggcctctcctaccagtctgcctggctcacggtgctgccagaggaggaccccacatggaccgcagcagcgcccgaggccaggtatacggacatcatcctgtacgcgtcgggctccctggccttggctgtgctcctgctgctggccgggctgtatcgagggcaggcgctccacggccggcacccccgcccgcccgccactgtgcagaagctctcccgcttccctctggcccgacagttctccctggagtcaggctcttccggcaagtcaagctcatccctggtacgaggcgtgcgtctctcctccagcggccccgccttgctcgccggcctcgtgagtctagatctacctctcgacccactatgggagttcccccgggacaggctggtgcttgggaagcccctaggcgagggctgctttggccaggtagtacgtgcagaggcctttggcatggaccctgcccggcctgaccaagccagcactgtggccgtcaagatgctcaaagacaacgcctctgacaaggacctggccgacctggtctcggagatggaggtgatgaagctgatcggccgacacaagaacatcatcaacctgcttggtgtctgcacccaggaagggcccctgtacgtgatcgtggagtgcgccgccaagggaaacctgcgggagttcctgcgggcccggcgccccccaggccccgacctcagccccgacggtcctcggagcagtgaggggccgctctccttcccagtcctggtctcctgcgcctaccaggtggcccgaggcatgcagtatctggagtcccggaagtgtatccaccgggacctggctgcccgcaatgtgctggtgactgaggacaatgtgatgaagattgctgactttgggctggcccgcggcgtccaccacattgactactataagaaaaccagcaacggccgcctgcctgtgaagtggatggcgcccgaggccttgtttgaccgggtgtacacacaccagagtgacgtgtggtcttttgggatcctgctatgggagatcttcaccctcgggggctccccgtatcctggcatcccggtggaggagctgttctcgctgctgcgggagggacatcggatggaccgacccccacactgccccccagagctgtacgggctgatgcgtgagtgctggcacgcagcgccctcccagaggcctaccttcaagcagctggtggaggcgctggacaaggtcctgctggccgtctctgaggagtacctcgacctccgcctgaccttcggaccctattccccctctggtggggacgccagcagcacctgctcctccagcgattctgtcttcagccacgaccccctgccattgggatccagctccttccccttcgggtctggggtgcagacatgagcaaggctcaaggctgtgcaggcacataggctggtggccttgggccttggggctcagccacagcctgacacagtgctcgaccttgatagcatggggcccctggcccagagttgctgtgccgtgtccaagggccgtgcccttgcccttggagctgccgtgcctgtgtcctgatggcccaaatgtcagggttctgctcggcttcttggaccatggcgcttagtccccatcccgggtttggctgagcctggctggagagctgctatgctaaacctcctgcctcccaataccagcaggaggttctgggcctctgaaccccctttccccacacctccccctgctgctgctgccccagcgtcttgacgggagcattggcccctgagcccagagaagctggaagcctgccgaaaacaggagcaaatggcgttttataaattatttttttgaaataaa

SEQ ID NO: 3 - DNA, 3682 bp, Homo Sapiens
  ref <308>: DATABASE ACCESSION NUMBER: GenBank NM_001066
  ref <309>: DATABASE ENTRY DATE: 2003-12-20
gcgagcgcagcggagcctggagagaaggcgctgggctgcgagggcgcgagggcgcgagggcagggggcaaccggaccccgcccgcacccatggcgcccgtcgccgtctgggccgcgctggccgtcggactggagctctgggctgcggcgcacgccttgcccgcccaggtggcatttacaccctacgccccggagcccgggagcacatgccggctcagagaatactatgaccagacagctcagatgtgctgcagcaaatgctcgccgggccaacatgcaaaagtcttctgtaccaagacctcggacaccgtgtgtgactcctgtgaggacagcacatacacccagctctggaactgggttcccgagtgcttgagctgtggctcccgctgtagctctgaccaggtggaaactcaagcctgcactcgggaacagaaccgcatctgcacctgcaggcccggctggtactgcgcgctgagcaagcaggaggggtgccggctgtgcgcgccgctgcgcaagtgccgcccgggcttcggcgtggccagaccaggaactgaaacatcagacgtggtgtgcaagccctgtgccccggggacgttctccaacacgacttcatccacggatatttgcaggccccaccagatctgtaacgtggtggccatccctgggaatgcaagcatggatgcagtctgcacgtccacgtcccccacccggagtatggccccaggggcagtacacttaccccagccagtgtccacacgatcccaacacacgcagccaactccagaacccagcactgctccaagcacctccttcctgctcccaatgggccccagccccccagctgaagggagcactggcgacttcgctcttccagttggactgattgtgggtgtgacagccttgggtctactaataataggagtggtgaactgtgtcatcatgacccaggtgaaaaagaagcccttgtgcctgcagagagaagccaaggtgcctcacttgcctgccgataaggcccggggtacacagggccccgagcagcagcacctgctgatcacagcgccgagctccagcagcagctccctggagagctcggccagtgcgttggacagaagggcgcccactcggaaccagccacaggcaccaggcgtggaggccagtggggccggggaggcccgggccagcaccgggagctcagattcttcccctggtggccatgggacccaggtcaatgtcacctgcatcgtgaacgtctgtagcagctctgaccacagctcacagtgctcctcccaagccagctccacaatgggagacacagattccagcccctcggagtccccgaaggacgagcaggtccccttctccaaggaggaatgtgcctttcggtcacagctggagacgccagagaccctgctggggagcaccgaagagaagcccctgccccttggagtgcctgatgctgggatgaagcccagttaaccaggccggtgtgggctgtgtcgtagccaaggtgggctgagccctggcaggatgaccctgcgaaggggccctggtccttccaggcccccaccactaggactctgaggctctttctgggccaagttcctctagtgccctccacagccgcagcctccctctgacctgcaggccaagagcagaggcagcgagttgtggaaagcctctgctgccatggcgtgtccctctcggaaggctggctgggcatggacgttcggggcatgctggggcaagtccctgactctctgtgacctgccccgcccagctgcacctgccagcctggcttctggagcccttgggttttttgtttgtttgtttgtttgtttgtttgtttctccccctgggctctgccccagctctggcttccagaaaaccccagcatccttttctgcagaggggctttctggagaggagggatgctgcctgagtcacccatgaagacaggacagtgcttcagcctgaggctgagactgcgggatggtcctggggctctgtgcagggaggaggtggcagccctgtagggaacggggtccttcaagttagctcaggaggcttggaaagcatcacctcaggccaggtgcagtggctcacgcctatgatcccagcactttgggaggctgaggcgggtggatcacctgaggttaggagttcgagaccagcctggccaacatggtaaaaccccatctctactaaaaatacagaaattagccgggcgtggtggcgggcacctatagtcccagctactcagaagcctgaggctgggaaatcgtttgaacccgggaagcggaggttgcagggagccgagatcacgccactgcactccagcctgggcgacagagcgagagtctgtctcaaaagaaaaaaaaaagcaccgcctccaaatgccaacttgtccttttgtaccatggtgtgaaagtcagatgcccagagggcccaggcaggccaccatattcagtgctgtggcctgggcaagataacgcacttctaactagaaatctgccaattttttaaaaaagtaagtaccactcaggccaacaagccaacgacaaagccaaactctgccagccacatccaaccccccacctgccatttgcaccctccgccttcactccggtgtgcctgcagccccgcgcctccttccttgctgtcctaggccacaccatctcctttcagggaatttcaggaactagagatgactgagtcctcgtagccatctctctactcctacctcagcctagaccctcctcctcccccagaggggtgggttcctcttccccactccccaccttcaattcctgggccccaaacgggctgccctgccactttggtacatggccagtgtgatcccaagtgccagtcttgtgtctgcgtctgtgttgcgtgtcgtgggtgtgtgtagccaaggtcggtaagttgaatggcctgccttgaagccactgaagctgggattcctccccattagagtcagccttccccctcccagggccagggccctgcagaggggaaaccagtgtagccttgcccggattctgggaggaagcaggttgaggggctcctggaaaggctcagtctcaggagcatggggataaaggagaaggcatgaaattgtctagcagagcaggggcagggtgataaattgttgataaattccactggacttgagcttggcagctgaactattggagggtgggagagcccagccattaccatggagacaagaagggttttccaccctggaatcaagatgtcagactggctggctgcagtgacgtgcacctgtactcaggaggctgaggggaggatcactggagcccaggagtttgaggctgcagcgagctatgatcgcgccactacactccagcctgagcaacagagtgagaccctgtctcttaaagaaaaaaaaagtcagactgctgggactggccaggtttctgcccacattggacccacatgaggacatgatggagcgcacctgccccctggtggacagtcctgggagaacctcaggcttccttggcatcacagggcagagccgggaagcgatgaatttggagactctgtggggccttggttcccttgtgtgtgtgtgttgatcccaagacaatgaaagtttgcactgtatgctggacggcattcctgcttatcaataaacctgtttgttttaaaaaaaa

SEQ ID NO: 4 - DNA, 20 bp, Artificial Sequence
  Primer CSFIR_F1
ctgccacttccccaccgagg

SEQ ID NO: 5 - DNA, 22 bp, Artificial Sequence
  Primer DDR1_F1
gggatcaggagctatgggacca

SEQ ID NO: 6 - DNA, 24 bp, Artificial Sequence
  Primer DDR2_F1
ctgagatgatcctgattcccagaa

SEQ ID NO: 7 - DNA, 20 bp, Artificial Sequence
  Primer EPHA1_F1
ggagctatggagcggcgctg

SEQ ID NO: 8 - DNA, 20 bp, Artificial Sequence
  Primer EPHA2_F1
agcgagaagcgcggcatgga

SEQ ID NO: 9 - DNA, 23 bp, Artificial Sequence
  Primer EPHA3_F1
caccagcaacatggattgtcagc

SEQ ID NO: 10 - DNA, 23 bp, Artificial Sequence
  Primer EPHA4_F1
cgaaccatggctgggattttcta

SEQ ID NO: 11 - DNA, 23 bp, Artificial Sequence
  Primer EOHA7_F1
ataaaacctgctcatgcaccatg

SEQ ID NO: 12 - DNA, 21 bp, Artificial Sequence
  Primer EPHB1_F1
gcgatggccctggattatcta

SEQ ID NO: 13 - DNA, 18 bp, Artificial Sequence
  Primer EPHB2_F1
ccccgggaagcgcagcca

SEQ ID NO: 14 - DNA, 20 bp, Artificial Sequence
  Primer EPHB3_F1
gctcctagagctgccacggc

SEQ ID NO: 15 - DNA, 21 bp, Artificial Sequence
  Primer EPHB4_F1
gatcctacccgagtgaggcgg

SEQ ID NO: 16 - DNA, 21 bp, Artificial Sequence
  Primer CSFIR_R1
gggctcctgcagagatgggta

SEQ ID NO: 17 - DNA, 22 bp, Artificial Sequence
  Primer DDR1_R1
agagccattggggacacaggga

SEQ ID NO: 18 - DNA, 21 bp, Artificial Sequence
  Primer DDR2_R1
agcctgactcctcctcccctg

SEQ ID NO: 19 - DNA, 22 bp, Artificial Sequence
  Primer EPHA1_R1
agctctgtcagcaagaccctgg

SEQ ID NO: 20 - DNA, 22 bp, Artificial Sequence
  Primer EPHA2_R1
aggtggtgtctggggccaggtc

SEQ ID NO: 21 - DNA, 23 bp, Artificial Sequence
  Primer EPHA3_R1
gtcaggcttgaggctactgatgg

SEQ ID NO: 22 - DNA, 25 bp, Artificial Sequence
  Primer EPHA4_R1
aacataggaagtgagagggttcagg

SEQ ID NO: 23 - DNA, 23 bp, Artificial Sequence
  Primer EPHA7_R1
actccattgggatgctctggttc

SEQ ID NO: 24 - DNA, 21 bp, Artificial Sequence
  Primer EPHB1_R1
agcccatcaatccttgctgtg

SEQ ID NO: 25 - DNA, 20 bp, Artificial Sequence
  Primer EPHB2_R1
gcgtgcccgcacctggaaga

SEQ ID NO: 26 - DNA, 20 bp, Artificial Sequence
  Primer EPHB3_R1
gctggtcactgtggaggcga

SEQ ID NO: 27 - DNA, 21 bp, Artificial Sequence
  Primer EPHB4_R1
ggtagctggctccccgcttca

SEQ ID NO: 28 - DNA, 21 bp, Artificial Sequence
  Primer CSFIR_R2
ccgagggtcttaccaaactgc

SEQ ID NO: 29 - DNA, 22 bp, Artificial Sequence
  Primer DDR1_R2
aagcggagtcgagatcgaggga

SEQ ID NO: 30 - DNA, 20 bp, Artificial Sequence
  Primer DDR2_R2
ggggaactcctccacagcca

SEQ ID NO: 31 - DNA, 21 bp, Artificial Sequence
  Primer EPHA1_R2
cgggtaaagtccaaggctccc

SEQ ID NO: 32 - DNA, 23 bp, Artificial Sequence
  Primer EPHA2_R2
gacacaggatggatggatctcgg

SEQ ID NO: 33 - DNA, 24 bp, Artificial Sequence
  Primer EPHA3_R2
atcaatggatatgttggtggcatc

SEQ ID NO: 34 - DNA, 23 bp, Artificial Sequence
  Primer EPHA4_R2
aggatgcgtcaatttctttggca

SEQ ID NO: 35 - DNA, 21 bp, Artificial Sequence
  Primer EPHA7_R2
ctgcaccaatcacacgctcaa

SEQ ID NO: 36 - DNA, 22 bp, Artificial Sequence
  Primer EPHB1_R2
atcaatctccttggcaaactcc

SEQ ID NO: 37 - DNA, 20 bp, Artificial Sequence
  Primer EPHB2_R2
gcccatgatggaggcttcgc

SEQ ID NO: 38 - DNA, 21 bp, Artificial Sequence
  Primer EPHB3_R2
acgcaggacacgtcgatctcc

SEQ ID NO: 39 - DNA, 23 bp, Artificial Sequence
  Primer EPHB4_R2
acctgcaccaatcacctcttcaa

SEQ ID NO: 40 - DNA, 20 bp, Artificial Sequence
  Primer EPHB6_F1
agagtggcgggcatggtgtg

SEQ ID NO: 41 - DNA, 22 bp, Artificial Sequence
  Primer EPHB6_R1
gcggagctgatagtccaggatg

SEQ ID NO: 42 - DNA, 22 bp, Artificial Sequence
  Primer EPHB6_R2
cctgtcccaatgacctcctcaa

SEQ ID NO: 43 - DNA, 26 bp, Artificial Sequence
  Primer EPHA6_F1
ggagatgaaagactctccatttcaag

SEQ ID NO: 44 - DNA, 20 bp, Artificial Sequence
  Primer FGFR1_F1
attcgggatgtggagctgga

SEQ ID NO: 45 - DNA, 20 bp, Artificial Sequence
  Primer FGFR2_F1
aggaccggggattggtaccg

SEQ ID NO: 46 - DNA, 18 bp, Artificial Sequence
  Primer FGFR3_F1
catgggcgcccctgcctg

SEQ ID NO: 47 - DNA, 20 bp, Artificial Sequence
  Primer FGFR4_F1
agaaggagatgcggctgctg

SEQ ID NO: 48 - DNA, 22 bp, Artificial Sequence
  Primer TNFR1A(p55)_F1
agctgtctggcatgggcctctc

SEQ ID NO: 49 - DNA, 18 bp, Artificial Sequence
  Primer TNFR1B(p55)_F1
accggaccccgcccgcac

SEQ ID NO: 50 - DNA, 25 bp, Artificial Sequence
  Primer EPHA6_R1
atcttagaccgacagaaaatttggc

SEQ ID NO: 51 - DNA, 20 bp, Artificial Sequence
  Primer FGFR1_R1
caagggaccatcctgcgtgc

SEQ ID NO: 52 - DNA, 20 bp, Artificial Sequence
  Primer FGFR2_R1
aggggcttgcccagtgtcag

SEQ ID NO: 53 - DNA, 20 bp, Artificial Sequence
  Primer FGFR3_R1
gctcccatttggggtcggca

SEQ ID NO: 54 - DNA, 20 bp, Artificial Sequence
  Primer FGFR4_R1
cgggggaactcccatagtgg

SEQ ID NO: 55 - DNA, 22 bp, Artificial Sequence
  Primer TNFR1A(p55)_R1
ggcgcagcctcatctgagaaga

SEQ ID NO: 56 - DNA, 20 bp, Artificial Sequence
  Primer TNFR1B(p55)_R1
cacagcccacaccggcctgg

SEQ ID NO: 57 - DNA, 19 bp, Artificial Sequence
  Primer FLT3_F1
ggaggccatgccggcgttg

SEQ ID NO: 58 - DNA, 21 bp, Artificial Sequence
  Primer KIT_F1
cgcagctaccgcgatgagagg

SEQ ID NO: 59 - DNA, 20 bp, Artificial Sequence
  Primer MET_F1
ctcataatgaaggcccccgc

SEQ ID NO: 60 - DNA, 22 bp, Artificial Sequence
  Primer PDGFRA_F1
aagtttcccagagctatgggga

SEQ ID NO: 61 - DNA, 20 bp, Artificial Sequence
  Primer PDGFRB_F1
agcagcaaggacaccatgcg

SEQ ID NO: 62 - DNA, 20 bp, Artificial Sequence
  Primer RON_F1
ggtcccagctcgcctcgatg

SEQ ID NO: 63 - DNA, 22 bp, Artificial Sequence
  Primer TEK_F1
agatttggggaagcatggactc

SEQ ID NO: 64 - DNA, 21 bp, Artificial Sequence
  Primer TIE_F1
cggcctctggagtatggtctg

SEQ ID NO: 65 - DNA, 22 bp, Artificial Sequence
  Primer VEGFR1_F1
catggtcagctactgggacacc

SEQ ID NO: 66 - DNA, 21 bp, Artificial Sequence
  Primer VEGFR2_F1
aggtgcaggatgcagagcaag

SEQ ID NO: 67 - DNA, 19 bp, Artificial Sequence
  Primer VEGFR3_F1
agcggccggagatgcagcg

SEQ ID NO: 68 - DNA, 21 bp, Artificial Sequence
  Primer FLT3_R1
ctgctcgacacccactgtcca

SEQ ID NO: 69 - DNA, 21 bp, Artificial Sequence
  Primer KIT_R1
gcagaagtcttgcccacatcg

SEQ ID NO: 70 - DNA, 23 bp, Artificial Sequence
  Primer MET_R1
cttcgtgatcttcttcccagtga

SEQ ID NO: 71 - DNA, 22 bp, Artificial Sequence
  Primer PDGFRA_R1
agattcttagccaggcatcgca

SEQ ID NO: 72 - DNA, 20 bp, Artificial Sequence
  Primer PDGFRB_R1
agcgcaccgacagtggccga

SEQ ID NO: 73 - DNA, 20 bp, Artificial Sequence
  Primer RON_R1
gcacgggctgcccactgtca

SEQ ID NO: 74 - DNA, 24 bp, Artificial Sequence
  Primer TEK_R1
ctgtccgaggttccaaatagttga

SEQ ID NO: 75 - DNA, 21 bp, Artificial Sequence
  Primer TIE_R1
cgttctcactggggtccacca

SEQ ID NO: 76 - DNA, 22 bp, Artificial Sequence
  Primer VEGFR1_R1
attattgccatgcgctgagtga

SEQ ID NO: 77 - DNA, 21 bp, Artificial Sequence
  Primer VEGFR2_R1
gccgcttggataacaagggta

SEQ ID NO: 78 - DNA, 22 bp, Artificial Sequence
  Primer VEGFR3_R1
aactcggtccaggtgtccaggc

SEQ ID NO: 79 - DNA, 24 bp, Artificial Sequence
  Primer FLT3_R2
cttggaaactcccatttgagatca

SEQ ID NO: 80 - DNA, 21 bp, Artificial Sequence
  Primer KIT_R2
acaaccttcccgaaagctcca

SEQ ID NO: 81 - DNA, 22 bp, Artificial Sequence
  Primer MET_R2
actacatgctgcactgcctgga

SEQ ID NO: 82 - DNA, 22 bp, Artificial Sequence
  Primer PDGFRA_R2
cccgaccaagcactagtccatc

SEQ ID NO: 83 - DNA, 20 bp, Artificial Sequence
  Primer PDGFRB_R2
ccagagccgagggtgcgtcc

SEQ ID NO: 84 - DNA, 22 bp, Artificial Sequence
  Primer RON_R2
caggtcattcaggttgggagga

SEQ ID NO: 85 - DNA, 24 bp, Artificial Sequence
  Primer TEK_R2
atttgatgtcattccagtcaagca

SEQ ID NO: 86 - DNA, 21 bp, Artificial Sequence
  Primer TIE_R2
agcactgggtagctcaggggc

SEQ ID NO: 87 - DNA, 21 bp, Artificial Sequence
  Primer VEGFR1_R2
aactcccacttgctggcatca

SEQ ID NO: 88 - DNA, 21 bp, Artificial Sequence
  Primer VEGFR2_R2
aattcccatttgctggcatca

SEQ ID NO: 89 - DNA, 22 bp, Artificial Sequence
  Primer VEGFR3_R2
attcccactggctggcatcgta

SEQ ID NO: 90 - DNA, 713 bp, Homo sapiens
tgggtccctgagagctgtgagaaggagatgcggctgctgctggccctgttgggggtcctgctgagtgtgcctgggcctccagtcttgtccctggaggcctctgaggaagtggagcttgcaagcattcatctatcactgtgtctgcgagagaggactggccttgcagggcgcagggccctaagctgggctgcagagctggtgagccctgcctggctcccagcctggagcagcaagagcaggagctgacagtagcccttgggcagcctgtgcgtctgtgctgtgggcgggctgagcgtggtggccactggtacaaggagggcagtcgcctggcacctgctggccgtgtacggggctggaggggccgcctagagattgccagcttcctacctgaggatgctggccgctacctctgcctggcacgaggctccatgatcgtcctgcagaatctcaccttgattacaggtgactccttgacctccagcaacgatgatgaggaccccaagtcccatagggacccctcgaataggcacagttacccccagcaagcaccctactggacacacccccagcgcatggagaagaaactgcatgcagtacctgcggggaacaccgtcaagttccgctgtccagctgcaggcaaccccacgcccaccatccgctggcttaaggatggacaggcctttcatggggagaaccgcattggaggcattcgg

SEQ ID NO: 91 - protein, 72 aa, Homo sapiens
MRLLLALLGVLLSVPGPPVLSLEASEEVELASIHLSLCLRERTGLAGRRALSWAAELVSPAWLPAWSSKSRS

SEQ ID NO: 92 - DNA, 1582 bp, Homo sapiens
gatcccatcgcagctaccgcgatgagaggcgctcgcggcgcctgggattttctctgcgttctgctcctactgcttcgcgtccagacaggctcttctcaaccatctgtgagtccaggggaaccgtctccaccatccatccatccaggaaaatcagacttaatagtccgcgtgggcgacgagattaggctgttatgcactgatccgggctttgtcaaatggacttttgagatcctggatgaaacgaatgagaataagcagaatgaatggatcacggaaaaggcagaagccaccaacaccggcaaatacacgtgcaccaacaaacacggcttaagcaattccatttatgtgtttgttagagatcctgccaagcttttccttgttgaccgctccttgtatgggaaagaagacaacgacacgctggtccgctgtcctctcacagacccagaagtgaccaattattccctcaaggggtgccaggggaagcctcttcccaaggacttgaggtttattcctgaccccaaggcgggcatcatgatcaaaagtgtgaaacgcgcctaccatcggctctgtctgcattgttctgtggaccaggagggcaagtcagtgctgtcggaaaaattcatcctgaaagtgaggccagccttcaaagctgtgcctgttgtgtctgtgtccaaagcaagctatcttcttagggaaggggaagaattcacagtgacgtgcacaataaaagatgtgtctagttctgtgtactcaacgtggaaaagagaaaacagtcagactaaactacaggagaaatataatagctggcatcacggtgacttcaattatgaacgtcaggcaacgttgactatcagttcagcgagagttaatgattctggagtgttcatgtgttatgccaataatacttttggatcagcaaatgtcacaacaaccttggaagtagtagataaaggattcattaatatcttccccatgataaacactacagtatttgtaaacgatggagaaaatgtagatttgattgttgaatatgaagcattccccaaacctgaacaccagcagtggatctatatgaacagaaccttcactgataaatgggaagattatcccaagtctgagaatgaaagtaatatcagatacgtaagtgaacttcatctaacgagattaaaaggcaccgaaggaggcacttacacattcctagtgtccaattctgacgtcaatgctgccatagcatttaatgtttatgtgaatacttccctgtaaatagagtgattcggcttttaatcggcaccacccttccacccccaaaaaggagaaaattcatcaaaaccagaaatcctgacttacgacaggctcgtgaatggcatgctccaatgtgtggcagcaggattcccagagcccacaatagattggtatttttgtccaggaactgagcagagatgctctgcttctgtactgccagtggatgtgcagacactaaactcatctgggccaccgtttggaaagctagtggttcagagttctatagattctagtgcattcaagcacaatggcacggttgaatgtaaggcttacaacgatg

SEQ ID NO: 93 - protein, 413 aa, Homo sapiens
MRGARGAWDFLCVLLLLLRVQTGSSQPSVSPGEPSPPSIHPGKSDLIVRVGDEIRLLCTDPGFVKWTFEILDETNENKQNEWITEKAEATNTGKYTCTNKHGLSNSIYVFVRDPAKLFLVDRSLYGKEDNDTLVRCPLTDPEVTNYSLKGCQGKPLPKDLRFIPDPKAGIMIKSVKRAYHRLCLHCSVDQEGKSVLSEKFILKVRPAFKAVPVVSVSKASYLLREGEEFTVTCTIKDVSSSVYSTWKRENSQTKLQEKYNSWHHGDFNYERQATLTISSARVNDSGVFMCYANNTFGSANVTTTLEVVDKGFINIFPMINTTVFVNDGENVDLIVEYEAFPKPEHQQWIYMNRTFTDKWEDYPKSENESNIRYVSELHLTRLKGTEGGTYTFLVSNSDVNAAIAFNVYVNTSL

SEQ ID NO: 94 - DNA, 913 bp, Homo sapiens
agaaggcgctgggctgcgagggcgcgagggcgcgagggcagggggcaaccggaccccgcccgcacccatggcgcccgtcgccgtctgggccgcgctggccgtcggactggagctctgggctgcggcgcacgccttgcccgcccaggtggcatttacaccctacgccccggagcccgggagcacatgccggctcagagaatactatgaccagacagctcagatgtgctgcagcaaatgctcgccgggccaacatgcaaaagtcttctgtaccaagacctcggacaccgtgtgtgactcctgtgaggacagcacatacacccagctctggaactgggttcccgagtgcttgagctgtggctcccgctgtagctctgaccaggtggaaactcaagcctgcactcgggaacagaaccgcatctgcacctgcaggcccggctggtactgcgcgctgagcaagcaggaggggtgccggctgtgcgcgccgctgcgcaagtgccgcccgggcttcggcgtggccagaccagacctctcctagggctctagtgccaaggcccagctgtcccgcagagtgtctgagtggttgacaagttcggattgttccctgaaggaactgaaacatcagacgtggtgtgcaagccctgtgccccggggacgttctccaacacgacttcatccacggatatttgcaggccccaccagatctgtaacgtggtggccatccctgggaatgcaagcatggatgcagtctgcacgtccacgtcccccacccggagtatggccccaggggcagtacacttaccccagccagtgtccacacgatcccaacacacgcagccaactccagaacccagcactgctccaagcacctccttcctgctcccaatgggccccagccccccagctgaagggagca

SEQ ID NO: 95 - protein, 155 aa, Homo sapiens
MAPVAVWAALAVGLELWAAAHALPAQVAFTPYAPEPGSTCRLREYYDQTAQMCCSKCSPGQHAKVFCTKTSDTVCDSCEDSTYTQLWNWVPECLSCGSRCSSDQVETQACTREQNRICTCRPGWYCALSKQEGCRLCAPLRKCRPGFGVARPDLS

SEQ ID NO: 96 - protein, 680 aa, Homo sapiens
MELAALCRWGLLLALLPLPPGAASTQVCTGTDMKLRLPASPETHLDMLRHLYQGCQVVQGNLELTYLPTNASLSFLQDIQEVQGYVLIAHNQVRQVPLQRLRIVRGTQLFEDNYALAVLDNGDPLNNTTPVTGASPGGLRELQLRSLTEILKGGVLIQRNPQLCYQDTILWKDIFHKNNQLALTLIDTNRSRACHPCSPMCKGSRCWGESSEDCQSLTRTVCAGGCARCKGPLPTDCCHEQCAAGCTGPKHSDCLACLHFNHSGICELHCPALVTYNTDTFESMPNPEGRYTFGASCVTACPYNYLSTDVGSCTLVCPLHNQEVTAEDGTQRCEKCSKPCARVCYGLGMEHLREVRAVTSANIQEFAGCKKIFGSLAFLPESFDGDPASNTAPLQPEQLQVFETLEEITGYLYISAWPDSLPDLSVFQNLQVIRGRILHNGAYSLTLQGLGISWLGLRSLRELGSGLALIHHNTHLCFVHTVPWDQLFRNPHQALLHTANRPEDECVGEGLACHQLCARGHCWGPGPTQCVNCSQFLRGQECVEECRVLQGLPREYVNARHCLPCHPECQPQNGSVTCFGPEADQCVACAHYKDPPFCVARCPSGVKPDLSYMPIWKFPDEEGACQPCPINCTHSCVDLDDKGCPAEQRARLAWTPGCTLHCPSLPHWMLGGHCCREGTP

SEQ ID NO: 97 - protein, 633 aa, Homo sapiens
MELAALCRWGLLLALLPPGAASTQVCTGTDMKLRLPASPETHLDMLRHLYQGCQVVQGNLELTYLPTNASLSFLQDIQEVQGYVLIAHNQVRQVPLQRLRIVRGTQLFEDNYALAVLDNGDPLNNTTPVTGASPGGLRELQLRSLTEILKGGVLIQRNPQLCYQDTILWKDIFHKNNQLALTLIDTNRSRACHPCSPMCKGSRCWGESSEDCQSLTRTVCAGGCARCKGPLPTDCCHEQCAAGCTGPKHSDCLACLHFNHSGICELHCPALVTYNTDTFESMPNPEGRYTFGASCVTACPYNYLSTDVGSCTLVCPLHNQEVTAEDGTQRCEKCSKPCARVCYGLGMEHLREVRAVTSANIQEFAGCKKIFGSLAFLPESFDGDPASNTAPLQPEQLQVFETLEEITGYLYISAWPDSLPDLSVFQNLQVIRGRILHNGAYSLTLQGLGISWLGLRSLRELGSGLALIHHNTHLCFVHTVPWDQLFRNPHQALLHTANRPEDECVGEGLACHQLCARGHCWGPGPTQCVNCSQFLRGQECVEECRVLQGLPREYVNARHCLPCHPECQPQNGSVTCFGPEADQCVACAHYKDPPFCVARCPSGVKPDLSYMPIWKFPDEEGACQPCPINCTHS

SEQ ID NO: 98 - protein, 575 aa, Homo sapiens
MELAALCRWGLLLALLPPGAASTQVCTGTDMKLRLPASPETHLDMLRHLYQGCQVVQGNLELTYLPTNASLSFLQDIQEVQGYVLIAHNQVRQVPLQRLRIVRGTQLFEDNYALAVLDNGDPLNNTTPVTGASPGGLRELQLRSLTEILKGGVLIQRNPQLCYQDTILWKDIFHKNNQLALTLIDTNRSRACHPCSPMCKGSRCWGESSEDCQSLTRTVCAGGCARCKGPLPTDCCHEQCAAGCTGPKHSDCLACLHFNHSGICELHCPALVTYNTDTFESMPNPEGRYTFGASCVTACPYNYLSTDVGSCTLVCPLHNQEVTAEDGTQRCEKCSKPCARVCYGLGMEHLREVRAVTSANIQEFAGCKKIFGSLAFLPESFDGDPASNTAPLQPEQLQVFETLEEITGYLYISAWPDSLPDLSVFQNLQVIRGRILHNGAYSLTLQGLGISWLGLRSLRELGSGLALIHHYTHLCFVHTVPWDQLFRNPHQALLHTANRPEDECGKTGSPVCALPICQHTAVPRGPWQQRSWTCADCPSLCTLLDSAQLWLAWPLGMASLAGSYLPWHPSLPLCF

SEQ ID NO: 99 - protein, 523 aa, Homo sapiens
MVSYWDTGVLLCALLSCLLLTGSSSGSKLKDPELSLKGTQHIMQAGQTLHLQCRGEAAHKWSLPEMVSKESERLSITKSACGRNGKQFCSTLTLNTAQANHTGFYSCKYLAVPTSKKKETESAIYIFISDTGRPFVEMYSEIPEIIHMTEGRELVIPCRVTSPNITVTLKKFPLDTLIPDGKRIIWDSRKGFIISNATYKEIGLLTCEATVNGHLYKTNYLTHRQTNTIIDVQISTPRPVKLLRGHTLVLNCTATTPLNTRVQMTWSYPDEKNKRASVRRRIDQSNSHANIFYSVLTIDKMQNKDKGLYTCRVRSGPSFKSVNTSVHIYDKAFITVKHRKQQVLETVAGKRSYRLSMKVKAFPSPEVVWLKDGLPATEKSARYLTRGYSLIIKDVTEEDAGNYTILLSIKQSNVFKNLTATLIVNVKPQIYEILTCTAYGIPQPTIKWFWHPCNHNHSEARCDFCSNNEESFILDADSNMGNRIESITQRMAIIEGKNKLPPANSSFMLPPTSFSSNYFHFLP

SEQ ID NO: 100 - protein, 541 aa, Homo sapiens
MVSYWDTGVLLCALLSCLLLTGSSSGSKLKDPELSLKGTQHIMQAGQTLHLQCRGEAAHKWSLPEMVSKESERLSITKSACGRNGKQFCSTLTLNTAQANHTGFYSCKYLAVPTSKKKETESAIYIFISDTGRPFVEMYSEIPEIIHMTEGRELVIPCRVTSPNITVTLKKFPLDTLIPDGKRIIWDSRKGFIISNATYKEIGLLTCEATVNGHLYKTNYLTHRQTNTIIDVQISTPRPVKLLRGHTLVLNCTATTPLNTRVQMTWSYPDEKNKRASVRRRIDQSNSHANIFYSVLTIDKMQNKDKGLYTCRVRSGPSFKSVNTSVHIYDKAFITVKHRKQQVLETVAGKRSYRLSMKVKAFPSPEVVWLKDGLPATEKSARYLTRGYSLIIKDVTEEDAGNYTILLSIKQSNVFKNLTATLIVNVKPQIYEKAVSSFPDPALYPLGSRQILTCTAYGIPQPTIKWFWHPCNHNHSEARCDFCSNNEESFILDADSNMGNRIESITQRMAIIEGKNKLPPANSSFMLPPTSFSSNYFHFLP

SEQ ID NO: 101 - protein, 436 aa, Homo sapiens
MVSYWDTGVLLCALLSCLLLTGSSSGSKLKDPELSLKGTQHIMQAGQTLHLQCRGEAAHKWSLPEMVSKESERLSITKSACGRNGKQFCSTLTLNTAQANHTGFYSCKYLAVPTSKKKETESAIYIFISDTGRPFVEMYSEIPEIIHMTEGRELVIPCRVTSPNITVTLKKFPLDTLIPDGKRIIWDSRKGFIISNATYKEIGLLTCEATVNGHLYKTNYLTHRQTNTIIDVQISTPRPVKLLRGHTLVLNCTATTPLNTRVQMTWSYPDEKNKRASVRRRIDQSNSHANIFYSVLTIDKMQNKDKGLYTCRVRSGPSFKSVNTSVHIYDKAFITVKHRKQQVLETVAGKRSYRLSMKVKAFPSPEVVWLKDGLPATEKSARYLTRGYSLIIKDKNLTATLIVNVKPQERIRERISPDLYRIWYPSTYNQVVLAPL

SEQ ID NO: 102 - protein, 365 aa, Homo sapiens
MVSYWDTGVLLCALLSCLLLTGSSSGSKLKDPELSLKGTQHIMQAGQTLHLQCRGEAAHKWSLPEMVSKESERLSITKSACGRNGKQFCSTLTLNTAQANHTGFYSCKYLAVPTSKKKETESAIYIFISDTGRPFVEMYSEIPEIIHMTEGRELVIPCRVTSPNITVTLKKFPLDTLIPDGKRIIWDSRKGFIISNATYKEIGLLTCEATVNGHLYKTNYLTHRQTNTIIDVQISTPRPVKLLRGHTLVLNCTATTPLNTRVQMTWSYPDEKNKRASVRRRIDQSNSHANIFYSVLTIDKMQNKDKGLYTCRVRSGPSFKSVNTSVHIYGKHSSALPTHAMLSNHCRCLCSLNKSVFCWPRVTLS

SEQ ID NO: 103 - protein, 934 aa, Homo sapiens
MKAPAVLAPGILVLLFTLVQRSNGECKEALAKSEMNVNMKYQLPNFTAETPIQNVILHEHHIFLGATNYIYVLNEEDLQKVAEYKTGPVLEHPDCFPCQDCSSKANLSGGVWKDNINMALVVDTYYDDQLISCGSVNRGTCQRHVFPHNHTADIQSEVHCIFSPQIEEPSQCPDCVVSALGAKVLSSVKDRFINFFVGNTINSSYFPDHPLHSISVRRLKETKDGFMFLTDQSYIDVLPEFRDSYPIKYVHAFESNNFIYFLTVQRETLDAQTFHTRIIRFCSINSGLHSYMEMPLECILTEKRKKRSTKKEVFNILQAAYVSKPGAQLARQIGASLNDDILFGVFAQSKPDSAEPMDRSAMCAFPIKYVNDFFNKIVNKNNVRCLQHFYGPNHEHCFNRTLLRNSSGCEARRDEYRTEFTTALQRVDLFMGQFSEVLLTSISTFIKGDLTIANLGTSEGRFMQVVVSRSGPSTPHVNFLLDSHPVSPEVIVEHTLNQNGYTLVITGKKITKIPLNGLGCRHFQSCSQCLSAPPFVQCGWCHDKCVRSEECLSGTWTQQICLPAIYKVFPNSAPLEGGTRLTICGWDFGFRRNNKFDLKKTRVLLGNESCTLTLSESTMNTLKCTVGPAMNKHFNMSIIISNGHGTTQYSTFSYVDPVITSISPKYGPMAGGTLLTLTGNYLNSGNSRHISIGGKTCTLKSVSNSILECYTPAQTISTEFAVKLKIDLANRETSIFSYREDPIVYEIHPTKSFISGGSTITGVGKNLNSVSVPRMVINVHEAGRNFTVACQHRSNSEIICCTTPSLQQLNLQLPLKTKAFFMLDGILSKYFDLIYVHNPVFKPFEKPVMISMGNENVLEIKGNDIDPEAVKGEVLKVGNKSCENIHLHSEAVLCTVPNDLLKLNSELNIEVGFLHSSHDVNKEASVIMLFSGLK

SEQ ID NO: 104 - protein, 821 aa, Homo sapiens
MDSLASLVLCGVSLLLSGTVEGAMDLILINSLPLVSDAETSLTCIASGWRPHEPITIGRDFEALMNQHQDPLEVTQDVTREWAKKVVWKREKASKINGAYFCEGRVRGEAIRIRTMKMRQQASFLPATLTMTVDKGDNVNISFKKVLIKEEDAVIYKNGSFIHSVPRHEVPDILEVHLPHAQPQDAGVYSARYIGGNLFTSAFTRLIVRRCEAQKWGPECNHLCTACMNNGVCHEDTGECICPPGFMGRTCEKACELHTFGRTCKERCSGQEGCKSYVFCLPDPYGCSCATGWKGLQCNEGIQRMTPKIVDLPDHIEVNSGKFNPICKASGWPLPTNEEMTLVKPDGTVLHPKDFNHTDHFSVAIFTIHRILPPDSGVWVCSVNTVAGMVEKPFNISVKVLPKPLNAPNVIDTGHNFAVINISSEPYFGDGPIKSKKLLYKPVNHYEAWQHIQVTNEIVTLNYLEPRTEYELCVQLVRRGEGGEGHPGPVRRFTTASIGLPPPRGLNLLPKSQTTLNLTWQPSSEDDFYVEVERRSVQKSDQQNIKVPGNLTSVLLNNLHPREQYVVRARVNTKAQGEWSEDLTAWTLSDILPPQPENIKISNITHSSAVISWTILDGYSISSITIRYKVQGKNEDQHVDVKIKNATITQYQLKGLEPETAYQVDIFAENNIGSSNPAFSHELVTLPESQAPADLGGGKMLLIAILGSAGMTCLTVLLAFLIILQLKRANVQRRMAQAFQNVREEPAVQFNSGTLALNRKVKNNPDPTIYPVLDWNDIKFQDVIGEGNFGQVLKARIKKDGLRMDAAIKRMKEYASKDDHR

SEQ ID NO: 105 - protein, 864 aa, Homo sapiens
MDSLASLVLCGVSLLLSGTVEGAMDLILINSLPLVSDAETSLTCIASGWRPHEPITIGRDFEALMNQHQDPLEVTQDVTREWAKKVVWKREKASKINGAYFCEGRVRGEAIRIRTMKMRQQASFLPATLTMTVDKGDNVNISFKKVLIKEEDAVIYKNGSFIHSVPRHEVPDILEVHLPHAQPQDAGVYSARYIGGNLFTSAFTRLIVRRCEAQKWGPECNHLCTACMNNGVCHEDTGECICPPGFMGRTCEKACELHTFGRTCKERCSGQEGCKSYVFCLPDPYGCSCATGWKGLQCNEACHPGFYGPDCKLRCSCNNGEMCDRFQGCLCSPGWQGLQCEREGIQRMTPKIVDLPDHIEVNSGKFNPICKASGWPLPTNEEMTLVKPDGTVLHPKDFNHTDHFSVAIFTIHRILPPDSGVWVCSVNTVAGMVEKPFNISVKVLPKPLNAPNVIDTGHNFAVINISSEPYFGDGPIKSKKLLYKPVNHYEAWQHIQVTNEIVTLNYLEPRTEYELCVQLVRRGEGGEGHPGPVRRFTTASIGLPPPRGLNLLPKSQTTLNLTWQPSSEDDFYVEVERRSVQKSDQQNIKVPGNLTSVLLNNLHPREQYVVRARVNTKAQGEWSEDLTAWTLSDILPPQPENIKISNITHSSAVISWTILDGYSISSITIRYKVQGKNEDQHVDVKIKNATITQYQLKGLEPETAYQVDIFAENNIGSSNPAFSHELVTLPESQAPADLGGGKMLLIAILGSAGMTCLTVLLAFLIILQLKRANVQRRMAQAFQNVREEPAVQFNSGTLALNRKVKNNPDPTIYPVLDWNDIKFQDVIGEGNFGQVLKARIKKDGLRMDAAIKRMKEYASKDDHR

SEQ ID NO: 106 - protein, 444 aa, Homo sapiens
MGPEALSSLLLLLLVASGDADMKGHFDPAKCRYALGMQDRTIPDSDISASSSWSDSTAARHSRLESSDGDGAWCPAGSVFPKEEEYLQVDLQRLHLVALVGTQGRHAGGLGKEFSRSYRLRYSRDGRRWMGWKDRWGQEVISGNEDPEGVVLKDLGPPMVARLVRFYPRADRVMSVCLRVELYGCLWRDGLLSYTAPVGQTMYLSEAVYLNDSTYDGHTVGGLQYGGLGQLADGVVGLDDFRKSQELRVWPGYDYVGWSNHSFSSGYVEMEFEFDRLRAFQAMQVHCNNMHTLGARLPGGVECRFRRGPAMAWEGEPMRHNLGGNLGDPRARAVSVPLGGRVARFLQCRFCPHLPRTASPIMPRLTLLPCRASPGATPMLCLHCPQGQSGMGPPEWISLDLDSASRRSLARASLGRCTCVRSTALKIWLVLISPLMCVRDTLCW

SEQ ID NO: 107 - protein, 166 aa, Homo sapiens
MDTSKAQGELGWLLDPPKDGWSEQQQILNGTPLYMYQDCPMQGRRDTDHWLRSNWIYRGEEASRVHVELQFTVRDCKSFPGGAGPLGCKETFNLLYMESDQDVGIQLRRPLFQKVLLPSMPSGSWCRSLVAPYWVPEKVAETGRGCRGRILKRIWRLKAGHGGLCL

SEQ ID NO: 108 - protein, 90 aa, Homo sapiens
MELAALCRWGLLLALLPPGAASTQVCTGTDMKLRLPASPETHLDMLRHLYQGCQVVQGNLELTYLPTNASLSFLQVRPVGNPARPCLQLG

SEQ ID NO: 109 - protein, 209 aa, Homo sapiens
MMRTPSPIGTPRIGTVTPSKVSRSPRTCVPAAAHLITEKRRPVWEHTVILGAFPCPPAPYWTHPQRMEKKLHAVPAGNTVKFRCPAAGNPTPTIRWLKDGQAFHGENRIGGIRLRHQHWSLVMESVVPSDRGTYTCLVENAVGSIRYNYLLDVLERSPHRPILQAGLPANTTAVVGSDVELLCKVYSDAQPHIQWLKHIVINGSSFGAD

SEQ ID NO: 110 - protein, 479 aa, Homo sapiens
MVSYWDTGVLLCALLSCLLLTGSSSGSKLKDPELSLKGTQHIMQAGQTLHLQCRGEAAHKWSLPEMVSKESERLSITKSACGRNGKQFCSTLTLNTAQANHTGFYSCKYLAVPTSKKKETESAIYIFISDTGRPFVEMYSEIPEIIHMTEGRELVIPCRVTSPNITVTLKKFPLDTLIPDGKRIIWDSRKGFIISNATYKEIGLLTCEATVNGHLYKTNYLTHRQTNTIIDVQISTPRPVKLLRGHTLVLNCTATTPLNTRVQMTWSYPDEKNKRASVRRRIDQSNSHANIFYSVLTIDKMQNKDKGLYTCRVRSGPSFKSVNTSVHIYDKAFITVKHRKQQVLETVAGKRSYRLSMKVKAFPSPEVVWLKDGLPATEKSARYLTRGYSLIIKDVTEEDAGNYTILLSIKQSNVFKNLTATLIVNVKPQIYEKAVSSFPDPALYPLGSRQILTCTAYGIPQPTIKWFWHPCNHNHSEAR

SEQ ID NO: 111 - protein, 217 aa, Homo sapiens
MGTSHPAFLVLGCLLTGLSLILCQLSLPSILPNENEKVVQLNSSFSLRCFGESEVSWQYPMSEEESSDVEIRNEENNSGLFVTVLEVSSASAAHTGLYTCYYNHTQTEENELEGRHIYIYVPDPDVAFVPLGMTDYLVIVEDDDSAIIPCRTTDPETPVTLHNSEGVVPASYDSRQGFNGTFTVGPYICEATVKGKKFQTIPFNVYALKGTCIISFL

SEQ ID NO: 112 - protein, 798 aa, Homo sapiens
MDLILINSLPLVSDAETSLTCIASGWRPHEPITIGRDFEALMNQHQDPLEVTQDVTREWAKKVVWKREKASKINGAYFCEGRVRGEAIRIRTMKMRQQASFLPATLTMTVDKGDNVNISFKKVLIKEEDAVIYKNGSFIHSVPRHEVPDILEVHLPHAQPQDAGVYSARYIGGNLFTSAFTRLIVRRCEAQKWGPECNHLCTACMNNGVCHEDTGECICPPGFMGRTCEKACELHTFGRTCKERCSGQEGCKSYVFCLPDPYGCSCATGWKGLQCNEGIQRMTPKIVDLPDHIEVNSGKFNPICKASGWPLPTNEEMTLVKPDGTVLHPKDFNHTDHFSVAIFTIHRILPPDSGVWVCSVNTVAGMVEKPFNISVKVLPKPLNAPNVIDTGHNFAVINISSEPYFGDGPIKSKKLLYKPVNHYEAWQHIQVTNEIVTLNYLEPRTEYELCVQLVRRGEGGEGHPGPVRRFTTASIGLPPPRGLNLLPKSQTTLNLTWQPSSEDDFYVEVERRSVQKSDQQNIKVPGNLTSVLLNNLHPREQYVVRARVNTKAQGEWSEDLTAWTLSDILPPQPENIKISNITHSSAVISWTILDGYSISSITIRYKVQGKNEDQHVDVKIKNATITQYQLKGLEPETAYQVDIFAENNIGSSNPAFSHELVTLPESQAPADLGGGKMLLIAILGSAGMTCLTVLLAFLIILQLKRANVQRRMAQAFQNVREEPAVQFNSGTLALNRKVKNNPDPTIYPVLDWNDIKFQDVIGEGNFGQVLKARIKKDGLRMDAAIKRMKEYASKDDHR

SEQ ID NO: 113 - protein, 786 aa, Homo sapiens
MVWRVPPFLLPILFLASHVGAAVDLTLLANLRLTDPQRFFLTCVSGEAGAGRGSDAWGPPLLLEKDDRIVRTPPGPPLRLARNGSHQVTLRGFSKPSDLVGVFSCVGGAGARRTRVIYVHNSPGAHLLPDKVTHTVNKGDTAVLSARVHKEKQTDVIWKSNGSYFYTLDWHEAQDGRFLLQLPNVQPPSSGIYSATYLEASPLGSAFFRLIVRGCGAGRWGPGCTKECPGCLHGGVCHDHDGECVCPPGFTGTRCEQACREGRFGQSCQEQCPGISGCRGLTFCLPDPYGCSCGSGWRGSQCQEACAPGHFGADCRLQCQCQNGGTCDRFSGCVCPSGWHGVHCEKSDRIPQILNMASELEFNLETMPRINCAAAGNPFPVRGSIELRKPDGTVLLSTKAIVEPEKTTAEFEVPRLVLADSGFWECRVSTSGGQDSRRFKVNVKVPPVPLAAPRLLTKQSRQLVVSPLVSFSGDGPISTVRLHYRPQDSTMDWSTIVVDPSENVTLMNLRPKTGYSVRVQLSRPGEGGEGAWGPPTLMTTDCPEPLLQPWLEGWHVEGTDRLRVSWSLPLVPGPLVGDGFLLRLWDGTRGQERRENVSSPQARTALLTGLTPGTHYQLDVQLYHCTLLGPASPPAHVLLPPSGPPAPRHLHAQALSDSEIQLTWKHPEALPGPISKYVVEVQVAGGAGDPLWIDVDRPEETSTIIRGLNASTRYLFRMRASIQGLGDWSNTVEESTLGNGLQAEGPVQESRAAEEGLDQQLILAVVGSVSATCLTILAALLTLVCI

SEQ ID NO: 114 - DNA, 984 bp, Homo Sapiens
  CDS (37)...(897): SR005_A11
tgcccccacccccttaggcccgagggatcaggagctatgggaccagaggccctgtcatctttactgctgctgctcttggtggcaagtggagatgctgacatgaagggacattttgatcctgccaagtgccgctatgccctgggcatgcaggaccggaccatcccagacagtgacatctctgcttccagctcctggtcagattccactgccgcccgccacagcaggttggagagcagtgacggggatggggcctggtgccccgcagggtcggtgtttcccaaggaggaggagtacttgcaggtggatctacaacgactgcacctggtggctctggtgggcacccagggacggcatgccgggggcctgggcaaggagttctcccggagctaccggctgcgttactcccgggatggtcgccgctggatgggctggaaggaccgctggggtcaggaggtgatctcaggcaatgaggaccctgagggagtggtgctgaaggaccttgggccccccatggttgcccgactggttcgcttctacccccgggctgaccgggtcatgagcgtctgtctgcgggtagagctctatggctgcctctggagggatggactcctgtcttacaccgcccctgtggggcagacaatgtatttatctgaggccgtgtacctcaacgactccacctatgacggacataccgtgggcggactgcagtatgggggtctgggccagctggcagatggtgtggtggggctggatgactttaggaagagtcaggagctgcgggtctggccaggctatgactatgtgggatggagcaaccacagcttctccagtggctatgtggagatggagtttgagtttgaccggctgagggccttccaggctatgcagatgtggtgaacaattcctctccggcactgggaggcaccttcccgccagccccctggtggccgcctggcccacctcccaccaacttcagcagcttgg

SEQ ID NO: 115 - protein, 286 aa, Homo Sapiens [sequence omitted]

SEQ ID NO: 116 - DNA, 788 bp, Homo Sapiens
  CDS (37)...(768)
tgcccccacccccttaggcccgagggatcaggagctatgggaccagaggccctgtcatctttactgctgctgctcttggtggcaagtggagatgctgacatgaagggacattttgatcctgccaagtgccgctatgccctgggcatgcaggaccggaccatcccagacagtgacatctctgcttccagctcctggtcagattccactgccgcccgccacagcaggttggagagcagtgacggggatggggcctggtgccccgcagggtcggtgtttcccaaggaggaggagtacttgcaggtggatctacaacgactgcacctggtggctctggtgggcacccagggacggcatgccgggggcctgggcaaggagttctcccggagctaccggctgcgttactcccgggatggtcgccgctggatgggctggaaggaccgctggggtcaggaggtgatctcaggcaatgaggaccctgagggagtggtgctgaaggaccttgggccccccatggttgcccgactggttcgcttctacccccgggctgaccgggtcatgagcgtctgtctgcgggtagagctctatggctgcctctggagggactgcagtatgggggtctgggccagctggcagatggtgtggtggggctggatgactttaggaagagtcaggagctgcgggtctggccaggctatgactatgtgggatggagcaaccacagcttctccagtggctatgtggagatggagtttgagtttgaccggctgagggccttccaggctatgcag

SEQ ID NO: 117 - protein, 243 aa, Homo Sapiens
MGPEALSSLLLLLLVASGDADMKGHFDPAKCRYALGMQDRTIPDSDISASSSWSDSTAARHSRLESSDGDGAWCPAGSVFPKEEEYLQVDLQRLHLVALVGTQGRHAGGLGKEFSRSYRLRYSRDGRRWMGWKDRWGQEVISGNEDPEGVVLKDLGPPMVARLVRFYPRADRVMSVCLRVELYGCLWRDCSMGVWASWQMVWWGWMTLGRVRSCGSGQAMTMWDGATTASPVAMWRWSLSLTG

SEQ ID NO: 118 - DNA, 878 bp, Homo Sapiens
  CDS (9)...(695)
gaactgggatgtggagctggaagtgcctcctcttctgggctgtgctggtcacagccacactctgcaccgctaggccgtccccgaccttgcctgaacaagatgctctcccctcctcggaggatgatgatgatgatgatgactcctcttcagaggagaaagaaacagataacaccaaaccaaaccccgtagctccatattggacatccccagaaaagatggaaaagaaattgcatgcagtgccggctgccaagacagtgaagttcaaatgcccttccagtgggaccccaaaccccacactgcgctggttgaaaaatggcaaagaattcaaacctgaccacagaattggaggctacaaggtccgttatgccacctggagcatcataatggactctgtggtgccctctgacaagggcaactacacctgcattgtggagaatgagtacggcagcatcaaccacacataccagctggatgtcgtggagcggtcccctcaccggcccatcctgcaagcagggttgcccgccaacaaaacagtggccctgggtagcaacgtggagttcatgtgtaaggtgtacagtgacccgcagccgcacatccagtggctaaagcacatcgaggtgaatgggagcaagattggcccagacaacctgccttatgtccagatcttgaagccctggaagagaggccggcagtgatgacctcgcccctgtacctggagatcatcatctattgcacaggggccttcctcatctcctgcatggtggggtcggtcatcgtctacaagatgaagagtggtaccaagaagagtgacttccacagccagatggctgtgcacaagctggccaagagcatccctctgcgcagacaggtaacagaaa

SEQ ID NO: 119 - protein, 228 aa, Homo Sapiens
MWSWKCLLFWAVLVTATLCTARPSPTLPEQDALPSSEDDDDDDDSSSEEKETDNTKPNPVAPYWTSPEKMEKKLHAVPAAKTVKFKCPSSGTPNPTLRWLKNGKEFKPDHRIGGYKVRYATWSIIMDSVVPSDKGNYTCIVENEYGSINHTYQLDVVERSPHRPILQAGLPANKTVALGSNVEFMCKVYSDPQPHIQWLKHIEVNGSKIGPDNLPYVQILKPWKRGRQ

SEQ ID NO: 120 - DNA, 1775 bp, Homo Sapiens
  CDS (26)...(1366)
ggtccctgagagctgtgagaaggagatgcggctgctgctggccctgttgggggtcctgctgagtgtgcctgggcctccagtcttgtccctggaggcctctgaggaagtggagcttgagccctgcctggctcccagcctggagcagcaagagcaggagctgacagtagcccttgggcagcctgtgcgtctgtgctgtgggcgggctgagcgtggtggccactggtacaaggagggcagtcgcctggcacctgctggccgtgtacggggctggaggggccgcctagagattgccagcttcctacctgaggatgctggccgctacctctgcctggcacgaggctccatgatcgtcctgcagaatctcaccttgattacaggtgactccttgacctccagcaacgatgatgaggaccccaagtcccatagggacccctcgaataggcacagttacccccagcaagcaccctactggacacacccccagcgcatggagaagaaactgcatgcagtacctgcggggaacaccgtcaagttccgctgtccagctgcaggcaaccccacgcccaccatccgctggcttaaggatggacaggcctttcatggggagaaccgcattggaggcattcggctgcgccatcagcactggagtctcgtgatggagagcgtggtgccctcggaccgcggcacatacacctgcctggtagagaacgctgtgggcagcatccgctataactacctgctagatgtgctggagcggtccccgcaccggcccatcctgcaggccgggctcccggccaacaccacagccgtggtgggcagcgacgtggagctgctgtgcaaggtgtacagcgatgcccagccccacatccagtggctgaagcacatcgtcatcaacggcagcagcttcggagccgacggtttcccctatgtgcaagtcctaaagactgcagacatcaatagctcagaggtggaggtcctgtacctgcggaacgtgtcagccgaggacgcaggcgagtacacctgcctcgcaggcaattccatcggcctctcctaccagtctgcctggctcacggtgctgccaggtgagcacctgaagggccaggagatgctgcgagatgcccctctgggccagcagtgggggctgtggcctgttgggtggtcagtctctgttggcctgtggggtctggcctggggggcagtgtgtggatttgtgggtttgagctgtatgacagcccctctgtgcctctccacacgtggccgtccatgtgaccgtctgctgaggtgtgggtgcctgggactgggcataactacagcttcctccgtgtgtgtccccacatatgttgggagctgggagggactgagttagggtgcacggggcggccagtctcaccactgaccagtttgtctgtctgtgtgtgtccatgtgcgagggcagaggaggaccccacatggaccgcagcagcgcccgaggccaggtatacggacatcatcctgtacgcgtcgggctccctggccttggctgtgctcctgctgctggccgggctgtatcgagggcaggcgctccacggccggcacccccgcccgcccgccactgtgcagaagctctcccgcttccctctggcccgacagttctccctggagtcaggctcttccggcaagtcaagctcatccctggtacgaggcgtgcgtctctcctccagcggccccgccttgctcgccggcctcgtgagtctagatctacctctcgacccactatgggagttcccccgggacag

SEQ ID NO: 121 - protein, 446 aa, Homo Sapiens
MRLLLALLGVLLSVPGPPVLSLEASEEVELEPCLAPSLEQQEQELTVALGQPVRLCCGRAERGGHWYKEGSRLAPAGRVRGWRGRLEIASFLPEDAGRYLCLARGSMIVLQNLTLITGDSLTSSNDDEDPKSHRDPSNRHSYPQQAPYWTHPQRMEKKLHAVPAGNTVKFRCPAAGNPTPTIRWLKDGQAFHGENRIGGIRLRHQHWSLVMESVVPSDRGTYTCLVENAVGSIRYNYLLDVLERSPHRPILQAGLPANTTAVVGSDVELLCKVYSDAQPHIQWLKHIVINGSSFGADGFPYVQVLKTADINSSEVEVLYLRNVSAEDAGEYTCLAGNSIGLSYQSAWLTVLPGEHLKGQEMLRDAPLGQQWGLWPVGWSVSVGLWGLAWGAVCGFVGLSCMTAPLCLSTRGRPCDRLLRCGCLGLGITTASSVCVPTYVGSWEGLS

SEQ ID NO: 122 - DNA, 923 bp, Homo Sapiens
  CDS (253)...(777)
gcggacactcctctcggctcctccccggcagcggcggcggctcggagcgggctccggggctcgggtgcagcggccagcgggcgcctggcggcgaggattacccggggaagtggttgtctcctggctggagccgcgagacgggcgctcagggcgcggggccggcggcggcgaacgagaggacggactctggcggccgggtcgttggccgcggggagcgcgggcaccgggcgagcaggccgcgtcgcgctcaccatggtcagctactgggacaccggggtcctgctgtgcgcgctgctcagctgtctgcttctcacaggatctagttcaggttcaaaattaaaagatcctgaactgagtttaaaaggcacccagcacatcatgcaagcaggccagacactgcatctccaatgcaggggggaagcagcccataaatggtctttgcctgaaatggtgagtaaggaaagcgaaaggctgagcataactaaatctgcctgtggaagaaatggcaaacaattctgcagtactttaaccttgaacacagctcaagcaaaccacactggcttctacagctgcaaatatctagctgtacctacttcaaagaagaaggaaacagaatctgcaatctatatatttattagtgatacaggtagacctttcgtagagatgtacagtgaaatccccgaaattatacacatgactgaaggaagggagctcgtcattccctgccgggttacgtcacctaacatcactgttactttaaaaaagaagaaggcataaggagaaagtcagatcatggattattttcttctgtttggactcaccgtgcttgggaatacttctgagcattagagagcacttcattcattgcagagtctctggcctccgaggctgccttcaccatcagcagcttcagcttctgggag

SEQ ID NO: 123 - protein, 174 aa, Homo Sapiens [sequence omitted]

SEQ ID NO: 124 - DNA, 783 bp, Homo Sapiens
  CDS (17)...(700)
cgcgcagcggccggagatgcagcggggcgccgcgctgtgcctgcgactgtggctctgcctgggactcctggacggcctggtgagtggctactccatgacccccccgaccttgaacatcacggaggagtcacacgtcatcgacaccggtgacagcctgtccatctcctgcaggggacagcaccccctcgagtgggcttggccaggagctcaggaggcgccagccaccggagacaaggacagcgaggacacgggggtggtgcgagactgcgagggcacagacgccaggccctactgcaaggtgttgctgctgcacgaggtacatgccaacgacacaggcagctacgtctgctactacaagtacatcaaggcacgcatcgagggcaccacggccgccagctcctacgtgttcgtgagaggaaggacgccatgtgggtgccctgtctggtgtccatccccggcctcaatgtcacgctgcgctcgcaaagctcggtgctgtggccagacgggcaggaggtggtgtgggatgaccggcggggcatgctcgtgtccacgccactgctgcacgatgccctgtacctgcagtgcgagaccacctggggagaccaggacttcctttccaaccccttcctggtgcacatcacaggcaacgagctctatgacatccagctgttgcccaggaagtcgctggagctgctggtaggggagaagctggtcctgaactgcaccgtgtgggctgagtttaactcaggtgtcacctttgactgggactacccagggaagcag

SEQ ID NO: 125 - protein, 227 aa, Homo Sapiens
MQRGAALCLRLWLCLGLLDGLVSGYSMTPPTLNITEESHVIDTGDSLSISCRGQHPLEWAWPGAQEAPATGDKDSEDTGVVRDCEGTDARPYCKVLLLHEVHANDTGSYVCYYKYIKARIEGTTAASSYVFVRGRTPCGCPVWCPSPASMSRCARKARCCGQTGRRWCGMTGGACSCPRHCCTMPCTCSARPPGETRTSFPTPSWCTSQATSSMTSSCCPGSRWSCW

SEQ ID NO: 126 - DNA, 1356 bp, Homo Sapiens
  CDS (16)...(903)
gcgcagcggccggagatgcagcggggcgccgcgctgtgcctgcgactgtggctctgcctgggactcctggacggcctggtgagtggctactccatgacccccccgaccttgaacatcacggaggagtcacacgtcatcgacaccggtgacagcctgtccatctcctgcaggggacagcaccccctcgagtgggcttggccaggagctcaggaggcgccagccaccggagacaaggacagcgaggacacgggggtggtgcgagactgcgagggcacagacgccaggccctactgcaaggtgttgctgctgcacgaggtacatgccaacgacacaggcagctacgtctgctactacaagtacatcaaggcacgcatcgagggcaccacggccgccagctcctacgtgttcgtgagagactttgagcagccattcatcaacaagcctgacacgctcttggtcaacaggaaggacgccatgtgggtgccctgtctggtgtccatccccggcctcaatgtcacgctgcgctcgcaaagctcggtgctgtggccagacgggcaggaggtggtgtgggatgaccggcggggcatgctcgtgtccacgccactgctgcacgatgccctgtacctgcagtgcgagaccacctggggagaccaggacttcctttccaaccccttcctggtgcacatcacaggcaacgagctctatgacatccagctgttgcccaggaagtcgctggagctgctggtaggggagaagctggtcctgaactgcaccgtgtgggctgagtttaactcaggtgtcacctttgactgggactacccagggaagcagaaaatcccttcatcagcgtcgagtggctcaaaggacccatcctggaggccacggcaggagacgagctggtgaagctgcccgtgaagctggcagcgtaccccccgcccgagttccagtggtacaaggatggaaaggcactgtccgggcgccacagtccacatgccctggtgctcaaggaggtgacagaggccagcacaggcacctacaccctcgccctgtggaactccgctgctggcctgaggcgcaacatcagcctggagctggtggtgaatgtgcccccccagatacatgagaaggaggcctcctcccccagcatctactcgcgtcacagccgccaggccctcacctgcacggcctacggggtgcccctgcctctcagcatccagtggcactggcggccctggacaccctgcaagatgtttgcccagcgtagtctccggcggcggcagcagcaagacctcatgccacagtgccgtgactggagggcggtgaccacgcaggatgccgtgaaccccatcgagagcc

SEQ ID NO: 127 - protein, 295 aa, Homo Sapiens
MQRGAALCLRLWLCLGLLDGLVSGYSMTPPTLNITEESHVIDTGDSLSISCRGQHPLEWAWPGAQEAPATGDKDSEDTGVVRDCEGTDARPYCKVLLLHEVHANDTGSYVCYYKYIKARIEGTTAASSYVFVRDFEQPFINKPDTLLVNRKDAMWVPCLVSIPGLNVTLRSQSSVLWPDGQEVVWDDRRGMLVSTPLLHDALYLQCETTWGDQDFLSNPFLVHITGNELYDIQLLPRKSLELLVGEKLVLNCTVWAEFNSGVTFDWDYPGKQKIPSSASSGSKDPSWRPRQETSW

SEQ ID NO: 128 - DNA, 1589 bp, Homo Sapiens
  CDS (29)...(1516)
ggatcctctagggtcccagctcgcctcgatggagctcctcccgccgctgcctcagtccttcctgttgctgctgctgttgcctgccaagcccgcggcgggcgaggactggcagtgcccgcgcaccccctacgcggcctctcgcgactttgacgtgaagtacgtggtgcccagcttctccgccggaggcctggtacaggccatggtgacctacgagggcgacagaaatgagagtgctgtgtttgtagccatacgcaatcgcctgcatgtgcttgggcctgacctgaagtctgtccagagcctggccacgggccctgctggagaccctggctgccagacgtgtgcagcctgtggcccaggaccccacggccctcccggtgacacagacacaaaggtgctggtgctggatcccgcgctgcctgcgctggtcagttgtggctccagcctgcagggccgctgcttcctgcatgacctagagccccaagggacagccgtgcatctggcagcgccagcctgcctcttctcagcccaccataaccggcccgatgactgccccgactgtgtggccagcccattgggcacccgtgtaactgtggttgagcaaggccaggcctcctatttctacgtggcatcctcactggacgcagccgtggctgccagcttcagcccacgctcagtgtctatcaggcgtctcaaggctgacgcctcgggattcgcaccgggctttgtggcgttgtcagtgctgcccaagcatcttgtctcctacagtattgaatacgtgcacagcttccacacgggagccttcgtatacttcctgactgtacagccggccagcgtgacagatgatcctagtgccctgcacacacgcctggcacggcttagcgccactgagccagagttgggtgactatcgggagctggtcctcgactgcagatttgctccaaaacgcaggcgccggggggccccagaaggcggacagccctaccctgtgctgcgggtggcccactccgctccagtgggtgcccaacttgccactgagctgagcatcgccgagggccaggaagtactatttggggtctttgtgactggcaaggatggtggtcctggcgtgggccccaactctgtcgtctgtgccttccccattgacctgctggacacactaattgatgagggtgtggagcgctgttgtgaatccccagtccatccaggcctccggcgaggcctcgacttcttccagtcgcccagtttttgccccaacccgcctggcctggaagccctcagccccaacaccagctgccgccacttccctctgctggtcagtagcagcttctcacgtgtggacctattcaatgggctgttgggaccagtacaggtcactgcattgtatgtgacacgccttgacaacgtcacagtggcacacatgggcacaatggatgggcgtatcctgcaggtgggtcctcatccccacagtcccctagccctgggtccttgtctccatccccattttgctcacatctgacctgtcctaggtggagctggtcaggtcactaaactacttgctgtatgtgtccaacttctcactgggtgacagt

SEQ ID NO: 129 - protein, 495 aa, Homo Sapiens
MELLPPLPQSFLLLLLLPAKPAAGEDWQCPRTPYAASRDFDVKYVVPSFSAGGLVQAMVTYEGDRNESAVFVAIRNRLHVLGPDLKSVQSLATGPAGDPGCQTCAACGPGPHGPPGDTDTKVLVLDPALPALVSCGSSLQGRCFLHDLEPQGTAVHLAAPACLFSAHHNRPDDCPDCVASPLGTRVTVVEQGQASYFYVASSLDAAVAASFSPRSVSIRRLKADASGFAPGFVALSVLPKHLVSYSIEYVHSFHTGAFVYFLTVQPASVTDDPSALHTRLARLSATEPELGDYRELVLDCRFAPKRRRRGAPEGGQPYPVLRVAHSAPVGAQLATELSIAEGQEVLFGVFVTGKDGGPGVGPNSVVCAFPIDLLDTLIDEGVERCCESPVHPGLRRGLDFFQSPSFCPNPPGLEALSPNTSCRHFPLLVSSSFSRVDLFNGLLGPVQVTALYVTRLDNVTVAHMGTMDGRILQVGPHPHSPLALGPCLHPHFAHI

SEQ ID NO: 130 - DNA, 1505 bp, Homo Sapiens
  CDS (41)...(1144)
tgcacatttgtggaaactggatggagagatttggggaagcatggactctttagccagcttagttctctgtggagtcagcttgctcctttctggaactgtggaaggtgccatggacttgatcttgatcaattccctacctcttgtatctgatgctgaaacatctctcacctgcattgcctctgggtggcgcccccatgagcccatcaccataggaagggactttgaagccttaatgaaccagcaccaggatccgctggaagttactcaagatgtgaccagagaatgggctaaaaaagttgtttggaagagagaaaaggctagtaagatcaatggtgcttatttctgtgaagggcgagttcgaggagaggcaatcaggatacgaaccatgaagatgcgtcaacaagcttccttcctaccagctactttaactatgactgtggacaagggagataacgtgaacatatctttcaaaaaggtattgattaaagaagaagatgcagtgatttacaaaaatggttccttcatccattcagtgccccggcatgaagtacctgatattctagaagtacacctgcctcatgctcagccccaggatgctggagtgtactcggccaggtatataggaggaaacctcttcacctcggccttcaccaggctgatagtccggagatgtgaagcccagaagtggggacctgaatgcaaccatctctgtactgcttgtatgaacaatggtgtctgccatgaagatactggagaatgcatttgccctcctgggtttatgggaaggacgtgtgagaaggcttgtgaactgcacacgtttggcagaacttgtaaagaaaggtgcagtggacaagagggatgcaagtcttatgtgttctgtctccctgacccctatgggtgttcctgtgccacaggctggaagggtctgcagtgcaatgaagcatgccaccctggtttttacgggccagattgtaagcttaggtgcagctgcaacaatggggagatgtgtgatcgcttccaaggatgtctctgctctccaggatggcaggggctccagtgtgagagagaaggtaaagcaaggcatacagaggatgaccccaaagatagtggatttgccagatcatatagaagtaaacagtggtaaatttaatcccatttgcaaagcttctggctggccgctacctactaatgaagaaatgaccctggtgaagccggatgggacagtgctccattagccatattcaccatccaccggatcctcccccctgactcaggagtttgggtctgcagtgtgaacacagtggctgggatggtggaaaagcccttcaacatttctgttaaagttcttccaaagcccctgaatgccccaaacgtgattgacactggacataactttgctgtcatcaacatcagctctgagccttactttggggatggaccaatcaaatccaagaagcttctatacaaacccgttaatcactatgaggcttggcaacatattcaag

SEQ ID NO: 131 - protein, 367 aa, Homo Sapiens
MDSLASLVLCGVSLLLSGTVEGAMDLILINSLPLVSDAETSLTCIASGWRPHEPITIGRDFEALMNQHQDPLEVTQDVTREWAKKVVWKREKASKINGAYFCEGRVRGEAIRIRTMKMRQQASFLPATLTMTVDKGDNVNISFKKVLIKEEDAVIYKNGSFIHSVPRHEVPDILEVHLPHAQPQDAGVYSARYIGGNLFTSAFTRLIVRRCEAQKWGPECNHLCTACMNNGVCHEDTGECICPPGFMGRTCEKACELHTFGRTCKERCSGQEGCKSYVFCLPDPYGCSCATGWKGLQCNEACHPGFYGPDCKLRCSCNNGEMCDRFQGCLCSPGWQGLQCEREGKARHTEDDPKDSGFARSYRSKQW

SEQ ID NO: 132 - DNA, 1467 bp, Homo Sapiens
  CDS (41)...(1447)
tgcacatttgtggaaactggatggagagatttggggaagcatggactctttagccagcttagttctctgtggagtcagcttgctcctttctggaactgtggaaggtgccatggacttgatcttgatcaattccctacctcttgtatctgatgctgaaacatctctcacctgcattgcctctgggtggcgcccccatgagcccatcaccataggaagggactttgaagccttaatgaaccagcaccaggatccgctggaagttactcaagatgtgaccagagaatgggctaaaaaagttgtttggaagagagaaaaggctagtaagatcaatggtgcttatttctgtgaagggcgagttcgaggagaggcaatcaggatacgaaccatgaagatgcgtcaacaagcttccttcctaccagctactttaactatgactgtggacaagggagataacgtgaacatatctttcaaaaaggtattgattaaagaagaagatgcagtgatttacaaaaatggttccttcatccattcagtgccccggcatgaagtacctgatattctagaagtacacctgcctcatgctcagccccaggatgctggagtgtactcggccaggtatataggaggaaacctcttcacctcggccttcaccaggctgatagtccggagatgtgaagcccagaagtggggacctgaatgcaaccatctctgtactgcttgtatgaacaatggtgtctgccatgaagatactggagaatgcatttgccctcctgggtttatgggaaggacgtgtgagaaggcttgtgaactgcacacgtttggcagaacttgtaaagaaaggtgcagtggacaagagggatgcaagtcttatgtgttctgtctccctgacccctatgggtgttcctgtgccacaggctggaagggtctgcagtgcaatgaaggcatacagaggatgaccccaaagatagtggatttgccagatcatatagaagtaaacagtggtaaatttaatcccatttgcaaagcttctggctggccgctacctactaatgaagaaatgaccctggtgaagccggatgggacagtgctccatccaaaagactttaaccatacggatcatttctcagtagccatattcaccatccaccggatcctcccccctgactcaggagtttgggtctgcagtgtgaacacagtggctgggatggtggaaaagcccttcaacatttctgttaaagttcttccaaagcccctgaatgccccaaacgtgattgacactggacataactttgctgtcatcaacatcagctctgagccttactttggggatggaccaatcaaatccaagaagcttctatacaaacccgttaatcactatgaggcttggcaacatattcaagtatccatggagaaacagaggctgactaaagcaaatagtgacaaatgagattgttacactcaactatt

SEQ ID NO: 133 - protein, 468 aa, Homo Sapiens
MDSLASLVLCGVSLLLSGTVEGAMDLILINSLPLVSDAETSLTCIASGWRPHEPITIGRDFEALMNQHQDPLEVTQDVTREWAKKVVWKREKASKINGAYFCEGRVRGEAIRIRTMKMRQQASFLPATLTMTVDKGDNVNISFKKVLIKEEDAVIYKNGSFIHSVPRHEVPDILEVHLPHAQPQDAGVYSARYIGGNLFTSAFTRLIVRRCEAQKWGPECNHLCTACMNNGVCHEDTGECICPPGFMGRTCEKACELHTFGRTCKERCSGQEGCKSYVFCLPDPYGCSCATGWKGLQCNEGIQRMTPKIVDLPDHIEVNSGKFNPICKASGWPLPTNEEMTLVKPDGTVLHPKDFNHTDHFSVAIFTIHRILPPDSGVWVCSVNTVAGMVEKPFNISVKVLPKPLNAPNVIDTGHNFAVINISSEPYFGDGPIKSKKLLYKPVNHYEAWQHIQVSMEKQRLTKANSDK

SEQ ID NO: 134 - DNA, 934 bp, Homo Sapiens
  CDS (17)...(772)
ggtcggcctctggagtatggtctggcgggtgccccctttcttgctccccatcctcttcttggcttctcatgtgggcgcggcggtggacctgacgctgctggccaacctgcggctcacggacccccagcgcttcttcctgacttgcgtgtctggggaggccggggcggggaggggctcggacgcctggggcccgcccctgctgctggagaaggacgaccgtatcgtgcgcaccccgcccgggccacccctgcgcctggcgcgcaacggttcgcaccaggtcacgcttcgcggcttctccaagccctcggacctcgtgggcgtcttctcctgcgtgggcggtgctggggcgcggcgcacgcgcgtcatctacgtgcacaacagccctggagcccacctgcttccagacaaggtcacacacactgtgaacaaaggtgacaccgctgtactttctgcacgtgtgcacaaggagaagcagacagacgtgatctggaagagcaacggatcctacttctacaccctggactggcatgaagcccaggatgggcggttcctgctgcagctcccaaatgtgcagccaccatcgagcggcatctacagtgccacttacctggaagccagccccctgggcagcgccttctttcggctcatcgtgcggggtcagaggcagagggcagaggttgtgggtagggtgggaggctgggagccctatgggtacttcctgtgggtcccctggagcccctggatctccagtcctcagtggtcaggtgggtgagggtcagctgctgaagacaccttcctccaggttgtggggctgggcgctgggggccaggctgtaccaaggagtgcccaggttgcctacatggaggtgtctgccacgaccatgacggcgaatgtgtatgcccccctggcttcactggcacccgctgtgaacagg

SEQ ID NO: 135 - protein, 251 aa, Homo Sapiens
MVWRVPPFLLPILFLASHVGAAVDLTLLANLRLTDPQRFFLTCVSGEAGAGRGSDAWGPPLLLEKDDRIVRTPPGPPLRLARNGSHQVTLRGFSKPSDLVGVFSCVGGAGARRTRVIYVHNSPGAHLLPDKVTHTVNKGDTAVLSARVHKEKQTDVIWKSNGSYFYTLDWHEAQDGRFLLQLPNVQPPSSGIYSATYLEASPLGSAFFRLIVRGQRQRAEVVGRVGGWEPYGYFLWVPWSPWISSPQWSGG

SEQ ID NO: 136 - DNA, 1619 bp, Homo Sapiens
  CDS (14)...(1153)
cggcctctggagtatggtctggcgggtgccccctttcttgctccccatcctcttcttggcttctcatgtgggcgcggcggtggacctgacgctgctggccaacctgcggctcacggacccccagcgcttcttcctgacttgcgtgtctggggaggccggggcggggaggggctcggacgcctggggcccgcccctgctgctggagaaggacgaccgtatcgtgcgcaccccgcccgggccacccctgcgcctggcgcgcaacggttcgcaccaggtcacgcttcgcggcttctccaagccctcggacctcgtgggcgtcttctcctgcgtgggcggtgctggggcgcggcgcacgcgcgtcatctacgtgcacaacagccctggagcccacctgcttccagacaaggtcacacacactgtgaacaaaggtgacaccgctgtactttctgcacgtgtgcacaaggagaagcagacagacgtgatctggaagagcaacggatcctacttctacaccctggactggcatgaagcccaggatgggcggttcctgctgcagctcccaaatgtgcagccaccatcgagcggcatctacagtgccacttacctggaagccagccccctgggcagcgccttctttcggctcatcgtgcggggttgtggggctgggcgctgggggccaggctgtaccaaggagtgcccaggttgcctacatggaggtgtctgccacgaccatgacggcgaatgtgtatgcccccctggcttcactggcacccgctgtgaacaggcctgcagagagggccgttttgggcagagctgccaggagcagtgcccaggcatatcaggctgccggggcctcaccttctgcctcccagacccctatggctgctcttgtggatctggctggagaggaagccagtgccaagaagcttgtgcccctggtcattttggggctgattgccgactccagtgccagtgtcagaatggtggcacttgtgaccggttcagtggttgtgtctgcccctctgggtggcatggagtgcactgtgagaagtcaggctggagggactgggtagatacctccactgagaaacagaacacggatgaggggcgctttggtggtcacgtgtctgcccctgtgggagctccaggatgagtgtcctttctccccagaccggatcccccagatcctcaacatggcctcagaactggagttcaacttagagacgatgccccggatcaactgtgcagctgcagggaaccccttccccgtgcggggcagcatagagctacgcaagccagacggcactgtgctcctgtccaccaaggccattgtggagccagagaagaccacagctgagttcgaggtgccccgcttggttcttgcggacagtgggttctgggagtgccgtgtgtccacatctggcggccaagacagccggcgcttcaaggtcaatgtgaaagtgccccccgtgcccctggctgcacctcggctcctgaccaagcagagccgccagcttgtggtctccccgctggtctcgttctctggggatggacccatctccactgtccgcctgcactaccggccccaggacagtaccatggactggtcgaccattgtg

SEQ ID NO: 137 - protein, 379 aa, Homo Sapiens
MVWRVPPFLLPILFLASHVGAAVDLTLLANLRLTDPQRFFLTCVSGEAGAGRGSDAWGPPLLLEKDDRIVRTPPGPPLRLARNGSHQVTLRGFSKPSDLVGVFSCVGGAGARRTRVIYVHNSPGAHLLPDKVTHTVNKGDTAVLSARVHKEKQTDVIWKSNGSYFYTLDWHEAQDGRFLLQLPNVQPPSSGIYSATYLEASPLGSAFFRLIVRGCGAGRWGPGCTKECPGCLHGGVCHDHDGECVCPPGFTGTRCEQACREGRFGQSCQEQCPGISGCRGLTFCLPDPYGCSCGSGWRGSQCQEACAPGHFGADCRLQCQCQNGGTCDRFSGCVCPSGWHGVHCEKSGWRDWVDTSTEKQNTDEGRFGGHVSAPVGAPG

SEQ ID NO: 138 - DNA, 740 bp, Homo Sapiens
  CDS (34)...(519)
tcgtcctggctggcctgggtcggcctctggagtatggtctggcgggtgccccctttcttgctccccatcctcttcttggcttctcatgtgggcgcggcggtggacctgacgctgctggccaacctgcggctcacggacccccagcgcttcttcctgacttgcgtgtctggggaggccggggcggggaggggctcggacgcctggggcccgcccctgctgctggagaaggacgaccgtatcgtgcgcaccccgcccgggccacccctgcgcctggcgcgcaacggttcgcaccaggtcacgcttcgcggcttctccaagccctcggacctcgtgggcgtcttctcctgcgtgggcggtgctggggcgcggcgcacgcgcgtcatctacgtgcacaacagccctggaggtgagttaggcaggcggggggatggcgcggggaaaaccaggccgctgacccaccttccaccccgcagcccacctgcttccagacaaggtcacacacactgtgaacaaaggtgacaccgctgtactttctgcacgtgtgcacaaggagaagcagacagacgtgatctggaagagcaacggatcctacttctacaccctggactggcatgaagcccaggatgggcggttcctgctgcagctcccaaatgtgcagccaccatcgagcggcatctacagtgccacttacctggaagccagccccctgggcagcgccttctttcggctcatcgtgcggg

SEQ ID NO: 139 - protein, 161 aa, Homo Sapiens
MVWRVPPFLLPILFLASHVGAAVDLTLLANLRLTDPQRFFLTCVSGEAGAGRGSDAWGPPLLLEKDDRIVRTPPGPPLRLARNGSHQVTLRGFSKPSDLVGVFSCVGGAGARRTRVIYVHNSPGGELGRRGDGAGKTRPLTHLPPRSPPASRQGHTHCEQR

SEQ ID NO: 140 - DNA, 1761 bp, Homo Sapiens
  CDS (14)...(1258)
cggcctctggagtatggtctggcgggtgccccctttcttgctccccatcctcttcttggcttctcatgtgggcgcggcggtggacctgacgctgctggccaacctgcggctcacggacccccagcgcttcttcctgacttgcgtgtctggggaggccggggcggggaggggctcggacgcctggggcccgcccctgctgctggagaaggacgaccgtatcgtgcgcaccccgcccgggccacccctgcgcctggcgcgcaacggttcgcaccaggtcacgcttcgcggcttctccaagccctcggacctcgtgggcgtcttctcctgcgtgggcggtgctggggcgcggcgcacgcgcgtcatctacgtgcacaacagccctggagcccacctgcttccagacaaggtcacacacactgtgaacaaaggtgacaccgctgtactttctgcacgtgtgcacaaggagaagcagacagacgtgatctggaagagcaacggatcctacttctacaccctggactggcatgaagcccaggatgggcggttcctgctgcagctcccaaatgtgcagccaccatcgagcggcatctacagtgccacttacctggaagccagccccctgggcagcgccttctttcggctcatcgtgcggggttgtggggctgggcgctgggggccaggctgtaccaaggagtgcccaggttgcctacatggaggtgtctgccacgaccatgacggcgaatgtgtatgcccccctggcttcactggcacccgctgtgaacaggcctgcagagagggccgttttgggcagagctgccaggagcagtgcccaggcatatcaggctgccggggcctcaccttctgcctcccagacccctatggctgctcttgtggatctggctggagaggaagccagtgccaagaagcttgtgcccctggtcattttggggctgattgccgactccagtgccagtgtcagaatggtggcacttgtgaccggttcagtggttgtgtctgcccctctgggtggcatggagtgcactgtgagaagtcagaccggatcccccagatcctcaacatggcctcagaactggagttcaacttagagacgatgccccggatcaactgtgcagctgcagggaaccccttccccgtgcggggcagcatagagctacgcaagccagacggcactgtgctcctggtcagcccccaatcaccccaacccaccagcccctcaggccgcctgcttcacagctgatccctaagaccccctagtccctcagaactttctgcagggcccacccattggcctgaccattgctcacatgaggtcaggctgattggtgagggggctgccactgggcctctgtcctgccatcagtccagacggacacctgggtgcctgccacagaggtgcccgttccctgtgacctgtccccttcccccatctcttttagtccaccaaggccattgtggagccagagaagaccacagctgagttcgaggtgccccgcttggttcttgcggacagtgggttctgggagtgccgtgtgtccacatctggcggccaagacagccggcgcttcaaggtcaatgtgaaagtgccccccgtgcccctggctgcacctcggctcctgaccaagcagagccgccagcttgtggtctccccgctggtctcgttctctggggatggacccatctccactgtccgcctgcactaccggccccaggacagtaccatggactggtcgaccattgtgg

SEQ ID NO: 141 - protein, 414 aa, Homo Sapiens
MVWRVPPFLLPILFLASHVGAAVDLTLLANLRLTDPQRFFLTCVSGEAGAGRGSDAWGPPLLLEKDDRIVRTPPGPPLRLARNGSHQVTLRGFSKPSDLVGVFSCVGGAGARRTRVIYVHNSPGAHLLPDKVTHTVNKGDTAVLSARVHKEKQTDVIWKSNGSYFYTLDWHEAQDGRFLLQLPNVQPPSSGIYSATYLEASPLGSAFFRLIVRGCGAGRWGPGCTKECPGCLHGGVCHDHDGECVCPPGFTGTRCEQACREGRFGQSCQEQCPGISGCRGLTFCLPDPYGCSCGSGWRGSQCQEACAPGHFGADCRLQCQCQNGGTCDRFSGCVCPSGWHGVHCEKSDRIPQILNMASELEFNLETMPRINCAAAGNPFPVRGSIELRKPDGTVLLVSPQSPQPTSPSGRLLHS

SEQ ID NO: 142 - DNA, 1230 bp, Homo Sapiens
  CDS (14)...(967)
cggcctctggagtatggtctggcgggtgccccctttcttgctccccatcctcttcttggcttctcatgtgggcgcggcggtggacctgacgctgctggccaacctgcggctcacggacccccagcgcttcttcctgacttgcgtgtctggggaggccggggcggggaggggctcggacgcctggggcccgcccctgctgctggagaaggacgaccgtatcgtgcgcaccccgcccgggccacccctgcgcctggcgcgcaacggttcgcaccaggtcacgcttcgcggcttctccaagccctcggacctcgtgggcgtcttctcctgcgtgggcggtgctggggcgcggcgcacgcgcgtcatctacgtgcacaacagccctggagcccacctgcttccagacaaggtcacacacactgtgaacaaaggtgacaccgctgtactttctgcacgtgtgcacaaggagaagcagacagacgtgatctggaagagcaacggatcctacttctacaccctggactggcatgaagcccaggatgggcggttcctgctgcagctcccaaatgtgcagccaccatcgagcggcatctacagtgccacttacctggaagccagccccctgggcagcgccttctttcggctcatcgtgcggggttgtggggctgggcgctgggggccaggctgtaccaaggagtgcccaggttgcctacatggaggtgtctgccacgaccatgacggcgaatgtgtatgcccccctggcttcactggcacccgctgtgaacaggcctgcagagagggccgttttgggcagagctgccaggagcagtgcccaggcatatcaggctgccggggcctcaccttctgcctcccagacccctatggctgctcttgtggatctggctggagaggaagccagtgccaagaagtccaccaaggccattgtggagccagagaagaccacagctgagttcgaggtgccccgcttggttcttgcggacagtgggttctgggagtgccgtgtgtccacatctggcggccaagacagccggcgcttcaaggtcaatgtgaaagtgccccccgtgcccctggctgcacctcggctcctgaccaagcagagccgccagcttgtggtctccccgctggtctcgttctctggggatggacccatctccactgtccgcctgcactaccggccccaggacagtaccatggactggtcgaccattgtgg

SEQ ID NO: 143 - protein, 317 aa, Homo Sapiens
MVWRVPPFLLPILFLASHVGAAVDLTLLANLRLTDPQRFFLTCVSGEAGAGRGSDAWGPPLLLEKDDRIVRTPPGPPLRLARNGSHQVTLRGFSKPSDLVGVFSCVGGAGARRTRVIYVHNSPGAHLLPDKVTHTVNKGDTAVLSARVHKEKQTDVIWKSNGSYFYTLDWHEAQDGRFLLQLPNVQPPSSGIYSATYLEASPLGSAFFRLIVRGCGAGRWGPGCTKECPGCLHGGVCHDHDGECVCPPGFTGTRCEQACREGRFGQSCQEQCPGISGCRGLTFCLPDPYGCSCGSGWRGSQCQEVHQGHCGAREDHS

SEQ ID NO: 144 - DNA, 1331 bp, Homo Sapiens
  CDS (24)...(944)
cctgccacttccccaccgaggccatgggcccaggagttctgctgctcctgctggtggccacagcttggcatggtcagggaatcccagtgatagagcccagtgtccctgagctggtcgtgaagccaggagcaacggtgaccttgcgatgtgtgggcaatggcagcgtggaatgggatggccccccatcacctcactggaccctgtactctgatggctccagcagcatcctcagcaccaacaacgctaccttccaaaacacggggacctatcgctgcactgagcctggagaccccctgggaggcagcgccgccatccacctctatgtcaaagaccctgcccggccctggaacgtgctagcacaggaggtggtcgtgttcgaggaccaggacgcactactgccctgtctgctcacagacccggtgctggaagcaggcgtctcgctggtgcgtgtgcgtggccggcccctcatgcgccacaccaactactccttctcgccctggcatggcttcaccatccacagggccaagttcattcagagccaggactatcaatgcagtgccctgatgggtggcaggaaggtgatgtccatcagcatccggctgaaagtgcagaaagtcatcccagggcccccagccttgacactggtgcctgcagagctggtgcggattcgaggggaggctgcccagatcgtgtgctcagccagcagcgttgatgttaactttgatgtcttcctccaacacaacaacaccaagctcgcaatccctcaacaatctgactttcataataaccgttaccaaaaagtcctgaccctcaacctcgatcaagtagatttccaacatgccggcaactactcctgcgtggccagcaacgtgcagggcaagcactccacctccatgttcttccgggtggtaggcacaccttcaccctctctctgccccgcctgaagccctctgaggctggccgctactccttcctggccagaaacccaggaggctggagagctctgacgtttgagctcacccttcgataccccccagaggtaagcgtcatatggacattcatcaacggctctggcacccttttgtgtgctgcctctgggtacccccagcccaacgtgacatggctgcagtgcagtggccacactgataggtgtgatgaggcccaagtgctgcaggtctgggatgacccataccctgaggtcctgagccaggagcccttccacaaggtgacggtgcagagcctgctgactgttgagaccttagagcacaaccaaacctacgagtgcagggcccacaacagcgtggggagtggctcctgggccttcataccca

SEQ ID NO: 145 - protein, 306 aa, Homo Sapiens
MGPGVLLLLLVATAWHGQGIPVIEPSVPELVVKPGATVTLRCVGNGSVEWDGPPSPHWTLYSDGSSSILSTNNATFQNTGTYRCTEPGDPLGGSAAIHLYVKDPARPWNVLAQEVVVFEDQDALLPCLLTDPVLEAGVSLVRVRGRPLMRHTNYSFSPWHGFTIHRAKFIQSQDYQCSALMGGRKVMSISIRLKVQKVIPGPPALTLVPAELVRIRGEAAQIVCSASSVDVNFDVFLQHNNTKLAIPQQSDFHNNRYQKVLTLNLDQVDFQHAGNYSCVASNVQGKHSTSMFFRVVGTPSPSLCPA

SEQ ID NO: 146 - DNA, 1508 bp, Homo Sapiens
  CDS (7)...(1017)
gacaccatgcggcttccgggtgcgatgccagctctggccctcaaaggcgagctgctgttgctgtctctcctgttacttctggaaccacagatctctcagggcctggtcgtcacacccccggggccagagcttgtcctcaatgtctccagcaccttcgttctgacctgctcgggttcagctccggtggtgtgggaacggatgtcccaggagcccccacaggaaatggccaaggcccaggatggcaccttctccagcgtgctcacactgaccaacctcactgggctagacacgggagaatacttttgcacccacaatgactcccgtggactggagaccgatgagcggaaacggctctacatctttgtgccagatcccaccgtgggcttcctccctaatgatgccgaggaactattcatctttctcacggaaataactgagatcaccattccatgccgagtaacagacccacagctggtggtgacactgcacgagaagaaaggggacgttgcactgcctgtcccctatgatcaccaacgtggcttttctggtatctttgaggacagaagctacatctgcaaaaccaccattggggacagggaggtggattctgatgcctactatgtctacagactccaggtgtcatccatcaacgtctctgtgaacgcagtgcagactgtggtccgccagggtgagaacatcaccctcatgtgcattgtgatcgggaatgaggtggtcaacttcgagtggacatacccccgcaaagaaagtgggcggctggtggagccggtgactgacttcctcttggatatgccttaccacatccgctccatcctgcacatccccagtgccgagttagaagactcggggacctacacctgcaatgtgacggagagtgtgaatgaccatcaggatgaaaaggccatcaacatcaccgtgagagcggctacgtgcggctcctgggagaggtgggcacactacaatttgctgagctgcatcggagccggacactgcaggtagtgttcgaggcctacccaccgcccactgtcctgtggttcaaagacaaccgcaccctgggcgactccagcgctggcgaaatcgccctgtccacgcgcaacgtgtcggagacccggtatgtgtcagagctgacactggttcgcgtgaaggtggcagaggctggccactacaccatgcgggccttccatgaggatgctgaggtccagctctccttccagctacagatcaatgtccctgtccgagtgctggagctaagtgagagccaccctgacagtggggaacagacagtccgctgtcgtggccggggcatgccccagccgaacatcatctggtctgcctgcagagacctcaaaaggtgtccacgtgagctgccgcccacgctgctggggaacagttccgaagaggagagccagctggagactaacgtgacgtactgggaggaggagcaggagtttgaggtggtgagcacactgcgtctgcagcacgtggatcgg

SEQ ID NO: 147 - protein, 336 aa, Homo Sapiens
MRLPGAMPALALKGELLLLSLLLLLEPQISQGLVVTPPGPELVLNVSSTFVLTCSGSAPVVWERMSQEPPQEMAKAQDGTFSSVLTLTNLTGLDTGEYFCTHNDSRGLETDERKRLYIFVPDPTVGFLPNDAEELFIFLTEITEITIPCRVTDPQLVVTLHEKKGDVALPVPYDHQRGFSGIFEDRSYICKTTIGDREVDSDAYYVYRLQVSSINVSVNAVQTVVRQGENITLMCIVIGNEVVNFEWTYPRKESGRLVEPVTDFLLDMPYHIRSILHIPSAELEDSGTYTCNVTESVNDHQDEKAINITVRAATCGSWERWAHYNLLSCIGAGHCR

SEQ ID NO: 148 - DNA, 1683 bp, Homo Sapiens
  CDS (20)...(1444)
caggtcccggcccggagctatggagcggcgctggcccctggggctagggctggtgctgctgctctgcgccccgctgcccccgggggcgcgcgccaaggaagttactctgatggacacaagcaaggcacagggagagctgggctggctgctggatcccccaaaagatgggtggagtgaacagcaacagatactgaatgggacacccctgtacatgtaccaggactgcccaatgcaaggacgcagagacactgaccactggcttcgctccaattggatctaccgcggggaggaggcttcccgcgtccacgtggagctgcagttcaccgtgcgggactgcaagagtttccctgggggagccgggcctctgggctgcaaggagaccttcaaccttctgtacatggagagtgaccaggatgtgggcattcagctccgacggcccttgttccagaaggtaaccacggtggctgcagaccagagcttcaccattcgagaccttgtgtctggctccgtgaagctgaatgtggagcgctgctctctgggccgcctgacccgccgtggcctctacctcgctttccacaacccgggtgcctgtgtggccctggtgtctgtccgggtcttctaccagcgctgtcctgagaccctgaatggcttggcccaattcccagacactctgcctggccccgctgggttggtggaagtggcggggacctgcttgccccacgcgcgggccagccccaggccctcaggtgcaccccgcatgcactgcagccctgatggcgagtggctggtgcctgtaggacggtgccactgtgagcctggctatgaggaaggtggcagtggcgaagcatgtgttgcctgccctagcggctcctaccggatggacatggacacaccccattgtctcacgtgcccccagcagagcactgctgagtctgagggggccaccatctgtacctgtgagagcggccattacagagctcccggggagggcccccaggtggcatgcacaggtcccccctcggccccccgaaacctgagcttctctgcctcagggactcagctctccctgcgttgggaacccccagcagatacggggggacgccaggatgtcagatacagtgtgaggtgttcccagtgtcagggcacagcacaggacggggggccctgccagccctgtggggtgggcgtgcacttctcgccgggggcccgggggctcaccacacctgcagtgcatgtcaatggccttgaaccttatgccaactacacctttaatgtggaagcccaaaatggagtgtcagggctgggcagctctggccatgccagcacctcagtcagcatcagcatggggcatgcaggtgagaggctgagaggggctgggacagggacctggtggagacagaagggcttaagaccacagaacaaactgatgggcaggaagccatagaaaagttactaaggttatttcctttttccttacatatccaaccttatccctctggacccccagagtcactgtcaggcctgtctctgagactggtgaagaaagaaccgaggcaactagagctgacctgggcggggtcccggccccgaagccctggggcgaacctgacctatgagctgcacgtgctgaaccaggatgaagaacggtaccagatggttctagaacccagggtcttgctgaca

SEQ ID NO: 149 - protein, 474 aa, Homo Sapiens
MERRWPLGLGLVLLLCAPLPPGARAKEVTLMDTSKAQGELGWLLDPPKDGWSEQQQILNGTPLYMYQDCPMQGRRDTDHWLRSNWIYRGEEASRVHVELQFTVRDCKSFPGGAGPLGCKETFNLLYMESDQDVGIQLRRPLFQKVTTVAADQSFTIRDLVSGSVKLNVERCSLGRLTRRGLYLAFHNPGACVALVSVRVFYQRCPETLNGLAQFPDTLPGPAGLVEVAGTCLPHARASPRPSGAPRMHCSPDGEWLVPVGRCHCEPGYEEGGSGEACVACPSGSYRMDMDTPHCLTCPQQSTAESEGATICTCESGHYRAPGEGPQVACTGPPSAPRNLSFSASGTQLSLRWEPPADTGGRQDVRYSVRCSQCQGTAQDGGPCQPCGVGVHFSPGARGLTTPAVHVNGLEPYANYTFNVEAQNGVSGLGSSGHASTSVSISMGHAGERLRGAGTGTWWRQKGLRPQNKLMGRKP

SEQ ID NO: 150 - DNA, 1375 bp, Homo Sapiens
  CDS (20)...(955)
caggtcccggcccggagctatggagcggcgctggcccctggggctagggctggtgctgctgctctgcgccccgctgcccccgggggcgcgcgccaaggaagttactctgatggacacaagcaaggcacagggagagctgggctggctgctggatcccccaaaagatgggtggagtgaacagcaacagatactgaatgggacacccctgtacatgtaccaggactgcccaatgcaaggacgcagagacactgaccactggcttcgctccaattggatctaccgcggggaggaggcttcccgcgtccacgtggagctgcagttcaccgtgcgggactgcaagagtttccctgggggagccgggcctctgggctgcaaggagaccttcaaccttctgtacatggagagtgaccaggatgtgggcattcagctccgacggcccttgttccagaaggtaaccacggtggctgcagaccagagcttcaccattcgagaccttgtgtctggctccgtgaagctgaatgtggagcgctgctctctgggccgcctgacccgccgtggcctctacctcgctttccacaacccgggtgcctgtgtggccctggtgtctgtccgggtcttctaccagcgctgtcctgagaccctgaatggcttggcccaattcccagacactctgcctggccccgctgggttggtggaagtggcggggacctgcttgccccacgcgcgggccagccccaggccctcaggtgcaccccgcatgcactgcagccctgatggcgagtggctggtgcctgtaggacggtgccactgtgagcctggctatgaggaaggtggcagtggcgaagcatgtgttggtaagaacggaggcggtgagaacctgaggaaccactcgggaggattgcaggagtaccccggcagagaaggaggccagtgctccgcctcagtgggtttttaacctgagtgtcccagagcagcggacacacacatgcagagatgtttccagtagaagggattggggcaggaaggggtggtggtggttctgcctgtaaaaacatttacagaaccactgctctgctgcgttctctctccagcctgccctagcggctcctaccggatggacatggacacaccccattgtctcacgtgcccccagcagagcactgctgagtctgagggggccaccatctgtacctgtgagagcggccattacagagctcccggggagggcccccaggtggcatgcacagagtcactgtcaggcctgtctctgagactggtgaagaaagaaccgaggcaactagagctgacctgggcggggtcccggccccgaagccctggggcgaacctgacctatgagctgcacgtgctgaaccag

SEQ ID NO: 151 - protein, 311 aa, Homo Sapiens
MERRWPLGLGLVLLLCAPLPPGARAKEVTLMDTSKAQGELGWLLDPPKDGWSEQQQILNGTPLYMYQDCPMQGRRDTDHWLRSNWIYRGEEASRVHVELQFTVRDCKSFPGGAGPLGCKETFNLLYMESDQDVGIQLRRPLFQKVTTVAADQSFTIRDLVSGSVKLNVERCSLGRLTRRGLYLAFHNPGACVALVSVRVFYQRCPETLNGLAQFPDTLPGPAGLVEVAGTCLPHARASPRPSGAPRMHCSPDGEWLVPVGRCHCEPGYEEGGSGEACVGKNGGGENLRNHSGGLQEYPGREGGQCSASVGF

SEQ ID NO: 152 - DNA, 1511 bp, Homo Sapiens
  CDS (20)...(1492)
caggtcccggcccggagctatggagcggcgctggcccctggggctagggctggtgctgctgctctgcgccccgctgcccccgggggcgcgcgccaaggaagttactctgatggacacaagcaaggcacagggagagctgggctggctgctggatcccccaaaagatgggtggagtgaacagcaacagatactgaatgggacacccctgtacatgtaccaggactgcccaatgcaaggacgcagagacactgaccactggcttcgctccaattggatctaccgcggggaggaggcttcccgcgtccacgtggagctgcagttcaccgtgcgggactgcaagagtttccctgggggagccgggcctctgggctgcaaggagaccttcaaccttctgtacatggagagtgaccaggatgtgggcattcagctccgacggcccttgttccagaaggtaaccacggtggctgcagaccagagcttcaccattcgagaccttgtgtctggctccgtgaagctgaatgtggagcgctgctctctgggccgcctgacccgccgtggcctctacctcgctttccacaacccgggtgcctgtgtggccctggtgtctgtccgggtcttctaccagcgctgtcctgagaccctgaatggcttggcccaattcccagacactctgcctggccccgctgggttggtggaagtggcggggacctgcttgccccacgcgcgggccagccccaggccctcaggtgcaccccgcatgcactgcagccctgatggcgagtggctggtgcctgtaggacggtgccactgtgagcctggctatgaggaaggtggcagtggcgaagcatgtgttgcctgccctagcggctcctaccggatggacatggacacaccccattgtctcacgtgcccccagcagagcactgctgagtctgagggggccaccatctgtacctgtgagagcggccattacagagctcccggggagggcccccaggtggcatgcacaggtcccccctcggccccccgaaacctgagcttctctgcctcagggactcagctctccctgcgttgggaacccccagcagatacggggggacgccaggatgtcagatacagtgtgaggtgttcccagtgtcagggcacagcacaggacggggggccctgccagccctgtggggtgggcgtgcacttctcgccgggggcccgggggctcaccacacctgcagtgcatgtcaatggccttgaaccttatgccaactacacctttaatgtggaagcccaaaatggagtgtcagggctgggcagctctggccatgccagcacctcagtcagcatcagcatggggcatgcagatccaaccttatccctctggacccccagagtcactgtcaggcctgtctctgagactggtgaagaaagaaccgaggcaactagagctgacctgggcggggtcccggccccgaagccctggggcgaacctgacctatgagctgcacgtgctgaaccag

SEQ ID NO: 153 - protein, 490 aa, Homo Sapiens
MERRWPLGLGLVLLLCAPLPPGARAKEVTLMDTSKAQGELGWLLDPPKDGWSEQQQILNGTPLYMYQDCPMQGRRDTDHWLRSNWIYRGEEASRVHVELQFTVRDCKSFPGGAGPLGCKETFNLLYMESDQDVGIQLRRPLFQKVTTVAADQSFTIRDLVSGSVKLNVERCSLGRLTRRGLYLAFHNPGACVALVSVRVFYQRCPETLNGLAQFPDTLPGPAGLVEVAGTCLPHARASPRPSGAPRMHCSPDGEWLVPVGRCHCEPGYEEGGSGEACVACPSGSYRMDMDTPHCLTCPQQSTAESEGATICTCESGHYRAPGEGPQVACTGPPSAPRNLSFSASGTQLSLRWEPPADTGGRQDVRYSVRCSQCQGTAQDGGPCQPCGVGVHFSPGARGLTTPAVHVNGLEPYANYTFNVEAQNGVSGLGSSGHASTSVSISMGHADPTLSLWTPRVTVRPVSETGEERTEATRADLGGVPAPKPWGEPDL

SEQ ID NO: 154 - DNA, 1107 bp, Homo Sapiens
  CDS (20)...(748)
tgcgggccgtcggccggcgatggccctggattatctactactgctcctcctggcatccgcagtggctgcgatggaagaaacgttaatggacaccagaacggctactgcagagctgggctggacggccaatcctgcgtccgggtgggaagaagtcagtggctacgatgaaaacctgaacaccatccgcacctaccaggtgtgcaatgtcttcgagcccaaccagaacaattggctgctcaccaccttcatcaaccggcggggggcccatcgcatctacacagagatgcgcttcactgtgagagactgcagcagcctccctaatgtcccaggatcctgcaaggagaccttcaacttgtattactatgagactgactctgtcattgccaccaagaagtcagccttctggtctgaggccccctacctcaaagtagacaccattgctgcagatgagagcttctcccaggtggactttgggggaaggctgatgaagcttgccctgcagggacattcaaggccagccaggaagctgaaggctgctcccactgcccctccaacagccgctcccctgcagaggcgtctcccatctgcacctgtcggaccggttattaccgagcggactttgaccctccagaagtggcatgcactagcgtcccatcaggtccccgcaatgttatctccatcgtcaatgagacgtccatcattctggagtggcaccctccaagggagacaggtgggcgggatgatgtgacctacaacatcatctgcaaaaagtgccgggcagaccgccggagctgctcccgctgtgacgacaatgtggagtttgtgcccaggcagctgggcctgacggagtgccgcgtctccatcagcagcctgtgggcccacaccccctacacctttgacatccaggccatcaatggagtctccagcaagagtcccttccccccacagcacgtctctgtcaacatcaccacaaaccaagccgccccctccaccgttcccatcatgcaccaagtcagtgccactatgaggagcatcaccttgtcatggccacagccggagcagcccaatggcatcatcctggactatgagatccggtactatgagaag

SEQ ID NO: 155 - protein, 242 aa, Homo Sapiens
MALDYLLLLLLASAVAAMEETLMDTRTATAELGWTANPASGWEEVSGYDENLNTIRTYQVCNVFEPNQNNWLLTTFINRRGAHRIYTEMRFTVRDCSSLPNVPGSCKETFNLYYYETDSVIATKKSAFWSEAPYLKVDTIAADESFSQVDFGGRLMKLALQGHSRPARKLKAAPTAPPTAAPLQRRLPSAPVGPVITERTLTLQKWHALASHQVPAMLSPSSMRRPSFWSGTLQGRQVGGMM

SEQ ID NO: 156 - DNA, 3952 bp, Homo Sapiens
  ref <308>: DATABASE ACCESSION NUMBER: GenBank No. NM013993
  ref <309>: DATABASE ENTRY DATE: 2004-10-28
ggcttaggaagtattaactgatctctgccctagttctcatgtgttaaatatggatagtaatagtatctaccttatgaagtgactgtgaagataaaattatggattctgtttaagggtttaggccagtgtctggcacaggggaagcattctaaaaatatagctgatgctgttaaacaatgactgttgttgttgttttactgttattatccccaaagcggcccattctgtctgttgctgtcagctatgactcagtcccctgattaacttacgcaccacccattttatcccctgcagagatgctgcccccacccccttaggcccgagggatcaggagctatgggaccagaggccctgtcatctttactgctgctgctcttggtggcaagtggagatgctgacatgaagggacattttgatcctgccaagtgccgctatgccctgggcatgcaggaccggaccatcccagacagtgacatctctgcttccagctcctggtcagattccactgccgcccgccacagcaggttggagagcagtgacggggatggggcctggtgccccgcagggtcggtgtttcccaaggaggaggagtacttgcaggtggatctacaacgactgcacctggtggctctggtgggcacccagggacggcatgccgggggcctgggcaaggagttctcccggagctaccggctgcgttactcccgggatggtcgccgctggatgggctggaaggaccgctggggtcaggaggtgatctcaggcaatgaggaccctgagggagtggtgctgaaggaccttgggccccccatggttgcccgactggttcgcttctacccccgggctgaccgggtcatgagcgtctgtctgcgggtagagctctatggctgcctctggagggatggactcctgtcttacaccgcccctgtggggcagacaatgtatttatctgaggccgtgtacctcaacgactccacctatgacggacataccgtgggcggactgcagtatgggggtctgggccagctggcagatggtgtggtggggctggatgactttaggaagagtcaggagctgcgggtctggccaggctatgactatgtgggatggagcaaccacagcttctccagtggctatgtggagatggagtttgagtttgaccggctgagggccttccaggctatgcaggtccactgtaacaacatgcacacgctgggagcccgtctgcctggcggggtggaatgtcgcttccggcgtggccctgccatggcctgggagggggagcccatgcgccacaacctagggggcaacctgggggaccccagagcccgggctgtctcagtgccccttggcggccgtgtggctcgctttctgcagtgccgcttcctctttgcggggccctggttactcttcagcgaaatctccttcatctctgatgtggtgaacaattcctctccggcactgggaggcaccttcccgccagccccctggtggccgcctggcccacctcccaccaacttcagcagcttggagctggagcccagaggccagcagcccgtggccaaggccgaggggagcccgaccgccatcctcatcggctgcctggtggccatcatcctgctcctgctgctcatcattgccctcatgctctggcggctgcactggcgcaggctcctcagcaaggctgaacggagggtgttggaagaggagctgacggttcacctctctgtccctggggacactatcctcatcaacaaccgcccaggtcctagagagccacccccgtaccaggagccccggcctcgtgggaatccgccccactccgctccctgtgtccccaatggctctgcgttgctgctctccaatccagcctaccgcctccttctggccacttacgcccgtccccctcgaggcccgggcccccccacacccgcctgggccaaacccaccaacacccaggcctacagtggggactatatggagcctgagaagccaggcgccccgcttctgcccccacctccccagaacagcgtcccccattatgccgaggctgacattgttaccctgcagggcgtcaccgggggcaacacctatgctgtgcctgcactgcccccaggggcagtcggggatgggccccccagagtggatttccctcgatctcgactccgcttcaaggagaagcttggcgagggccagtttggggaggtgcacctgtgtgaggtcgacagccctcaagatctggttagtcttgatttcccccttaatgtgcgtaagggacaccctttgctggtagctgtcaagatcttacggccagatgccaccaagaatgccaggaatgatttcctgaaagaggtgaagatcatgtcgaggctcaaggacccaaacatcattcggctgctgggcgtgtgtgtgcaggacgaccccctctgcatgattactgactacatggagaacggcgacctcaaccagttcctcagtgcccaccagctggaggacaaggcagccgagggggcccctggggacgggcaggctgcgcaggggcccaccatcagctacccaatgctgctgcatgtggcagcccagatcgcctccggcatgcgctatctggccacactcaactttgtacatcgggacctggccacgcggaactgcctagttggggaaaatttcaccatcaaaatcgcagactttggcatgagccggaacctctatgctggggactattaccgtgtgcagggccgggcagtgctgcccatccgctggatggcctgggagtgcatcctcatggggaagttcacgactgcgagtgacgtgtgggcctttggtgtgaccctgtgggaggtgctgatgctctgtagggcccagccctttgggtcagctcaccgacgagcaggtcatcgagaacgcgggggagttcttccgggaccagggccggcagtgtacctgtcccggccgcctgcctgcccgcagggcctatatgagctgatgcttcggtgctggagccgggagtctgagcagcgaccacccttttcccagctgcatcggttcctggcagaggatgcactcaacacggtgtgaatcacacatccagctgcccctccctcagggagcgatccaggggaagccagtgacactaaaacaagaggacacaatggcacctctgcccttcccctcccgacagcccatcacctctaatagaggcagtgagactgcaggtgggctgggcccacccagggagctgatgccccttctccccttcctggacacactctcatgtccccttcctgttcttccttcctagaagcccccctgtcgcccacccagctggtcctgtggatgggatcctctccaccctcctctagccatcccttggggaagggtggggagaaatataggatagacactggacatggcccattggagcacctgggccccactggacaacactgattcctggagaggtggctgcgcccccagcttctctctccctgtcacacactggaccccactggctgagaatctgggggtgaggaggacaagaaggagaggaaaatgtttccttgtgcctgctcctgtacttgtcctcagcttgggcttcttcctcctccatcacctgaaacactggacctgggggtagccccgccccagccctcagtcacccccacttcccacttgcagtcttgtagctagaacttctctaagcctatacgtttctgtggagtaaatattgggattggggggaaagagggagcaacggcccatagccttggggttggacatctctagtgtagctgccacattgatttttctataatcacttggggtttgtacatttttggggggagagacacagatttttacactaatatatggacctagcttgaggcaattttaatcccctgcactaggcaggtaataataaaggttgagttttccacaaaaaaaaaaaaaa

SEQ ID NO: 157 - DNA, 5777 bp, Homo Sapiens
  ref <308>: DATABASE ACCESSION NUMBER: GenBank No. NM002019
  ref <309>: DATABASE ENTRY DATE: 2004-10-28
gcggacactcctctcggctcctccccggcagcggcggcggctcggagcgggctccggggctcgggtgcagcggccagcgggcctggcggcgaggattacccggggaagtggttgtctcctggctggagccgcgagacgggcgctcagggcgcggggccggcggcggcgaacgagaggacggactctggcggccgggtcgttggccgggggagcgcgggcaccgggcgagcaggccgcgtcgcgctcaccatggtcagctactgggacaccggggtcctgctgtgcgcgctgctcagctgtctgcttctcacaggatctagttcaggttcaaaattaaaagatcctgaactgagtttaaaaggcacccagcacatcatgcaagcaggccagacactgcatctccaatgcaggggggaagcagcccataaatggtctttgcctgaaatggtgagtaaggaaagcgaaaggctgagcataactaaatctgcctgtggaagaaatggcaaacaattctgcagtactttaaccttgaacacagctcaagcaaaccacactggcttctacagctgcaaatatctagctgtacctacttcaaagaagaaggaaacagaatctgcaatctatatatttattagtgatacaggtagacctttcgtagagatgtacagtgaaatccccgaaattatacacatgactgaaggaagggagctcgtcattccctgccgggttacgtcacctaacatcactgttactttaaaaaagtttccacttgacactttgatccctgatggaaaacgcataatctgggacagtagaaagggcttcatcatatcaaatgcaacgtacaaagaaatagggcttctgacctgtgaagcaacagtcaatgggcatttgtataagacaaactatctcacacatcgacaaaccaatacaatcatagatgtccaaataagcacaccacgcccagtcaaattacttagaggccatactcttgtcctcaattgtactgctaccactcccttgaacacgagagttcaaatgacctggagttaccctgatgaaaaaaataagagagcttccgtaaggcgacgaattgaccaaagcaattcccatgccaacatattctacagtgttcttactattgacaaaatgcagaacaaagacaaaggactttatacttgtcgtgtaaggagtggaccatcattcaaatctgttaacacctcagtgcatatatatgataaagcattcatcactgtgaaacatcgaaaacagcaggtgcttgaaaccgtagctggcaagcggtcttaccggctctctatgaaagtgaaggcatttccctcgccggaagttgtatggttaaaagatgggttacctgcgactgagaaatctgctcgctatttgactcgtggctactcgttaattatcaaggacgtaactgaagaggatgcagggaattatacaatcttgctgagcataaaacagtcaaatgtgtttaaaaacctcactgccactctaattgtcaatgtgaaaccccagatttacgaaaaggccgtgtcatcgtttccagacccggctctctacccactgggcagcagacaaatcctgacttgtaccgcatatggtatccctcaacctacaatcaagtggttctggcacccctgtaaccataatcattccgaagcaaggtgtgacttttgttccaataatgaagagtcctttatcctggatgctgacagcaacatgggaaacagaattgagagcatcactcagcgcatggcaataatagaaggaaagaataagatggctagcaccttggttgtggctgactctagaatttctggaatctacatttgcatagcttccaataaagttgggactgtgggaagaaacataagcttttatatcacagatgtgccaaatgggtttcatgttaacttggaaaaaatgccgacggaaggagaggacctgaaactgtcttgcacagttaacaagttcttatacagagacgttacttggattttactgcggacagttaataacagaacaatgcactacagtattagcaagcaaaaaatggccatcactaaggagcactccatcactcttaatcttaccatcatgaatgtttccctgcaagattcaggcacctatgcctgcagagccaggaatgtatacacaggggaagaaatcctccagaagaaagaaattacaatcagagatcaggaagcaccatacctcctgcgaaacctcagtgatcacacagtggccatcagcagttccaccactttagactgtcatgctaatggtgtccccgagcctcagatcacttggtttaaaaacaaccacaaaatacaacaagagcctggaattattttaggaccaggaagcagcacgctgtttattgaaagagtcacagaagaggatgaaggtgtctatcactgcaaagccaccaaccagaagggctctgtggaaagttcagcatacctcactgttcaaggaacctcggacaagtctaatctggagctgatcactctaacatgcacctgtgtggctgcgactctcttctggctcctattaaccctccttatccgaaaaatgaaaaggtcttcttctgaaataaagactgactacctatcaattataatggacccagatgaagttcctttggatgagcagtgtgagcggctcccttatgatgccagcaagtgggagtttgcccgggagagacttaaactgggcaaatcacttggaagaggggcttttggaaaagtggttcaagcatcagcatttggcattaagaaatcacctacgtgccggactgtggctgtgaaaatgctgaaagagggggccacggccagcgagtacaaagctctgatgactgagctaaaaatcttgacccacattggccaccatctgaacgtggttaacctgctgggagcctgcaccaagcaaggagggcctctgatggtgattgttgaatactgcaaatatggaaatctctccaactacctcaagagcaaacgtgacttattttttctcaacaaggatgcagcactacacatggagcctaagaaagaaaaaatggagccaggcctggaacaaggcaagaaaccaagactagatagcgtcaccagcagcgaaagctttgcgagctccggctttcaggaagataaaagtctgagtgatgttgaggaagaggaggattctgacggtttctacaaggagcccatcactatggaagatctgatttcttacagttttcaagtggccagaggcatggagttcctgtcttccagaaagtgcattcatcgggacctggcagcgagaaacattcttttatctgagaacaacgtggtgaagatttgtgattttggccttgcccgggatatttataagaaccccgattatgtgagaaaaggagatactcgacttcctctgaaatggatggctcccgaatctatctttgacaaaatctacagcaccaagagcgacgtgtggtcttacggagtattgctgtgggaaatcttctccttaggtgggtctccatacccaggagtacaaatggatgaggacttttgcagtcgcctgagggaaggcatgaggatgagagctcctgagtactctactcctgaaatctatcagatcatgctggactgctggcacagagacccaaaagaaaggccaagatttgcagaacttgtggaaaaactaggtgatttgcttcaagcaaatgtacaacaggatggtaaagactacatcccaatcaatgccatactgacaggaaatagtgggtttacatactcaactcctgccttctctgaggacttcttcaaggaaagtatttcagctccgaagtttaattcaggaagctctgatgatgtcagatatgtaaatgctttcaagttcatgagcctggaaagaatcaaaacctttgaagaacttttaccgaatgccacctccatgtttgatgactaccagggcgacagcagcactctgttggcctctcccatgctgaagcgcttcacctggactgacagcaaacccaaggcctcgctcaagattgacttgagagtaaccagtaaaagtaaggagtcggggctgtctgatgtcagcaggcccagtttctgccattccagctgtgggcacgtcagcgaaggcaagcgcaggttcacctacgaccacgctgagctggaaaggaaaatcgcgtgctgctccccgcccccagactacaactcggtggtcctgtactccaccccacccatctagagtttgacacgaagccttatttctagaagcacatgtgtatttatacccccaggaaactagcttttgccagtattatgcatatataagtttacacctttatctttccatgggagccagctgctttttgtgatttttttaatagtgctttttttttttgactaacaagaatgtaactccagatagagaaatagtgacaagtgaagaacactactgctaaatcctcatgttactcagtgttagagaaatccttcctaaacccaatgacttccctgctccaacccccgccacctcagggcacgcaggaccagtttgattgaggagctgcactgatcacccaatgcatcacgtaccccactgggccagccctgcagcccaaaacccagggcaacaagcccgttagccccaggggatcactggctggcctgagcaacatctcgggagtcctctagcaggcctaagacatgtgaggaggaaaaggaaaaaaagcaaaaagcaagggagaaaagagaaaccgggagaaggcatgagaaagaatttgagacgcaccatgtgggcacggagggggacggggctcagcaatgccatttcagtggcttcccagctctgacccttctacatttgagggcccagccaggagcagatggacagcgatgaggggacattttctggattctgggaggcaagaaaaggacaaatatcttttttggaactaaagcaaattttagacctttacctatggaagtggttctatgtccattctcattcgtggcatgttttgatttgtagcactgagggtggcactcaactctgagcccatacttttggctcctctagtaagatgcactgaaaacttagccagagttaggttgtctccaggccatgatggccttacactgaaaatgtcacattctattttgggtattaatatatagtccagacacttaactcaatttcttggtattattctgttttgcacagttagttgtgaaagaaagctgagaagaatgaaaatgcagtcctgaggagagttttctccatatcaaaacgagggctgatggaggaaaaaggtcaataaggtcaagggaagaccccgtctctataccaaccaaaccaattcaccaacacagttgggacccaaaacacaggaagtcagtcacgtttccttttcatttaatggggattccactatctcacactaatctgaaaggatgtggaagagcattagctggcgcatattaagcactttaagctccttgagtaaaaaggtggtatgtaatttatgcaaggtatttctccagttgggactcaggatattagttaatgagccatcactagaagaaaagcccattttcaactgctttgaaacttgcctggggtctgagcatgatgggaatagggagacagggtaggaaagggcgcctactcttcagggtctaaagatcaagtgggccttggatcgctaagctggctctgtttgatgctatttatgcaagttagggtctatgtattta

SEQ ID NO: 158 - DNA, 4450 bp, Homo Sapiens
  ref <308>: DATABASE ACCESSION NUMBER: GenBank No. NM002020
  ref <309>: DATABASE ENTRY DATE: 2004-12-18
acccacgcgcagcggccggagatgcagcggggcgccgcgctgtgcctgcgactgtggctctgcctgggactcctggacggcctggtgagtgactactccatgacccccccgaccttgaacatcacggaggagtcacacgtcatcgacaccggtgacagcctgtccatctcctgcaggggacagcaccccctcgagtgggcttggccaggagctcaggaggcgccagccaccggagacaaggacagcgaggacacgggggtggtgcgagactgcgagggcacagacgccaggccctactgcaaggtgttgctgctgcacgaggtacatgccaacgacacaggcagctacgtctgctactacaagtacatcaaggcacgcatcgagggcaccacggccgccagctcctacgtgttcgtgagagactttgagcagccattcatcaacaagcctgacacgctcttggtcaacaggaaggacgccatgtgggtgccctgtctggtgtccatccccggcctcaatgtcacgctgcgctcgcaaagctcggtgctgtggccagacgggcaggaggtggtgtgggatgaccggcggggcatgctcgtgtccacgccactgctgcacgatgccctgtacctgcagtgcgagaccacctggggagaccaggacttcctttccaaccccttcctggtgcacatcacaggcaacgagctctatgacatccagctgttgcccaggaagtcgctggagctgctggtaggggagaagctggtcctcaactgcaccgtgtgggctgagtttaactcaggtgtcacctttgactgggactacccagggaagcaggcagagcggggtaagtgggtgcccgagcgacgctcccaacagacccacacagaactctccagcatcctgaccatccacaacgtcagccagcacgacctgggctcgtatgtgtgcaaggccaacaacggcatccagcgatttcgggagagcaccgaggtcattgtgcatgaaaatcccttcatcagcgtcgagtggctcaaaggacccatcctggaggccacggcaggagacgagctggtgaagctgcccgtgaagctggcagcgtaccccccgcccgagttccagtggtacaaggatggaaaggcactgtccgggcgccacagtccacatgccctggtgctcaaggaggtgacagaggccagcacaggcacctacaccctcgccctgtggaactccgctgctggcctgaggcgcaacatcagcctggagctggtggtgaatgtgcccccccagatacatgagaaggaggcctcctcccccagcatctactcgcgtcacagccgccaggccctcacctgcacggcctacggggtgcccctgcctctcagcatccagtggcactggcggccctggacaccctgcaagatgtttgcccagcgtagtctccggcggcggcagcagcaagacctcatgccacagtgccgtgactggagggcggtgaccacgcaggatgccgtgaaccccatcgagagcctggacacctggaccgagtttgtggagggaaagaataagactgtgagcaagctggtgatccagaatgccaacgtgtctgccatgtacaagtgtgtggtctccaacaaggtgggccaggatgagcggctcatctacttctatgtgaccaccatccccgacggcttcaccatcgaatccaagccatccgaggagctactagagggccagccggtgctcctgagctgccaagccgacagctacaagtacgagcatctgcgctggtaccgcctcaacctgtccacgctgcacgatgcgcacgggaacccgcttctgctcgactgcaagaacgtgcatctgttcgccacccctctggccgccagcctggaggaggtggcacctggggcgcgccacgccacgctcagcctgagtatcccccgcgtcgcgcccgagcacgagggccactatgtgtgcgaagtgcaagaccggcgcagccatgacaagcactgccacaagaagtacctgtcggtgcaggccctggaagcccctcggctcacgcagaacttgaccgacctcctggtgaacgtgagcgactcgctggagatgcagtgcttggtggccggagcgcacgcgcccagcatcgtgtggtacaaagacgagaggctgctggaggaaaagtctggagtcgacttggcggactccaaccagaagctgagcatccagcgcgtgcgcgaggaggatgcgggaccgtatctgtgcagcgtgtgcagacccaagggctgcgtcaactcctccgccagcgtggccgtggaaggctccgaggataagggcagcatggagatcgtgatccttgtcggtaccggcgtcatcgctgtcttcttctgggtcctcctcctcctcatcttctgtaacatgaggaggccggcccacgcagacatcaagacgggctacctgtccatcatcatggaccccggggaggtgcctctggaggagcaatgcgaatacctgtcctacgatgccagccagtgggaattcccccgagagcggctgcacctggggagagtgctcggctacggcgccttcgggaaggtggtggaagcctccgctttcggcatccacaagggcagcagctgtgacaccgtggccgtgaaaatgctgaaagagggcgccacggccagcgagcagcgcgcgctgatgtcggagctcaagatcctcattcacatcggcaaccacctcaacgtggtcaacctcctcggggcgtgcaccaagccgcagggccccctcatggtgatcgtggagttctgcaagtacggcaacctctccaacttcctgcgcgccaagcgggacgccttcagcccctgcgcggagaagtctcccgagcagcgcggacgcttccgcgccatggtggagctcgccaggctggatcggaggcggccggggagcagcgacagggtcctcttcgcgcggttctcgaagaccgagggcggagcgaggcgggcttctccagaccaagaagctgaggacctgtggctgagcccgctgaccatggaagatcttgtctgctacagcttccaggtggccagagggatggagttcctggcttcccgaaagtgcatccacagagacctggctgctcggaacattctgctgtcggaaagcgacgtggtgaagatctgtgactttggccttgcccgggacatctacaaagaccccgactacgtccgcaagggcagtgcccggctgcccctgaagtggatggcccctgaaagcatcttcgacaaggtgtacaccacgcagagtgacgtgtggtcctttggggtgcttctctgggagatcttctctctgggggcctccccgtaccctggggtgcagatcaatgaggagttctgccagcgcgtgagagacggcacaaggatgagggccccggagctggccactcccgccatacgccacatcatgctgaactgctggtccggagaccccaaggcgagacctgcattctcggacctggtggagatcctgggggacctgctccagggcaggggcctgcaagaggaagaggaggtctgcatggccccgcgcagctctcagagctcagaagagggcagcttctcgcaggtgtccaccatggccctacacatcgcccaggctgacgctgaggacagcccgccaagcctgcagcgccacagcctggccgccaggtattacaactgggtgtcctttcccgggtgcctggccagaggggctgagacccgtggttcctccaggatgaagacatttgaggaattccccatgaccccaacgacctacaaaggctctgtggacaaccagacagacagtgggatggtgctggcctcggaggagtttgagcagatagagagcaggcatagacaagaaagcggcttcaggtagctgaagcagagagagagaaggcagcatacgtcagcattttcttctctgcacttataagaaagatcaaagactttaagactttcgctatttcttctactgctatctactacaaacttcaaagaggaaccaggaggacaagaggagcatgaaagtggacaaggagtgtgaccactgaagcaccacagggaggggttaggcctccggatgactgcgggcaggcctggataatatccagcctcccacaagaagctggtggagcagagtgttccctgactcctccaaggaaagggagacgccctttcatggtctgctgagtaacaggtgccttcccagacactggcgttactgcttgaccaaagagccctcaagcggcccttatgccagcgtgacagagggctcacctcttgccttctaggtcacttctcacaatgtcccttcagcacctgaccctgtgcccgccgattattccttggtaatatgagtaatacatcaaagagtagtattaaaagctaattaatcatgtttataaaaa

SEQ ID NO: 159 - DNA, 4541 bp, Homo Sapiens
  ref <308>: DATABASE ACCESSION NUMBER: GenBank No. NM002447
  ref <309>: DATABASE ENTRY DATE: 2004-10-28
ggatcctctagggtcccagctcgcctcgatggagctcctcccgccgctgcctcagtccttcctgttgctgctgctgttgcctgccaagcccgcggcgggcgaggactggcagtgcccgcgcaccccctacgcggcctctcgcgactttgacgtgaagtacgtggtgcccagcttctccgccggaggcctggtacaggccatggtgacctacgagggcgacagaaatgagagtgctgtgtttgtagccatacgcaatcgcctgcatgtgcttgggcctgacctgaagtctgtccagagcctggccacgggccctgctggagaccctggctgccagacgtgtgcagcctgtggcccaggaccccacggccctcccggtgacacagacacaaaggtgctggtgctggatcccgcgctgcctgcgctggtcagttgtggctccagcctgcagggccgctgcttcctgcatgacctagagccccaagggacagccgtgcatctggcagcgccagcctgcctcttctcagcccaccataaccggcccgatgactgccccgactgtgtggccagcccattgggcacccgtgtaactgtggttgagcaaggccaggcctcctatttctacgtggcatcctcactggacgcagccgtggctggcagcttcagcccacgctcagtgtctatcaggcgtctcaaggctgacgcctcgggattcgcaccgggctttgtggcgttgtcagtgctgcccaagcatcttgtctcctacagtattgaatacgtgcacagcttccacacgggagccttcgtatacttcctgactgtacagccggccagcgtgacagatgatcctagtgccctgcacacacgcctggcacggcttagcgccactgagccagagttgggtgactatcgggagctggtcctcgactgcagatttgctccaaaacgcaggcgccggggggccccagaaggcggacagccctaccctgtgctgcaggtggcccactccgctccagtgggtgcccaacttgccactgagctgagcatcgccgagggccaggaagtactatttggggtctttgtgactggcaaggatggtggtcctggcgtgggccccaactctgtcgtctgtgccttccccattgacctgctggacacactaattgatgagggtgtggagcgctgttgtgaatccccagtccatccaggcctccggcgaggcctcgacttcttccagtcgcccagtttttgccccaacccgcctggcctggaagccctcagccccaacaccagctgccgccacttccctctgctggtcagtagcagcttctcacgtgtggacctattcaatgggctgttgggaccagtacaggtcactgcattgtatgtgacacgccttgacaacgtcacagtggcacacatgggcacaatggatgggcgtatcctgcaggtggagctggtcaggtcactaaactacttgctgtatgtgtccaacttctcactgggtgacagtgggcagcccgtgcagcgggatgtcagtcgtcttggggaccacctactctttgcctctggggaccaggttttccaggtacctatccgaggccctggctgccgccacttcctgacctgtgggcgttgcctaagggcatggcatttcatgggctgtggctggtgtgggaacatgtgcggccagcagaaggagtgtcctggctcctggcaacaggaccactgcccacctaagcttactgagttccacccccacagtggacctctaaggggcagtacaaggctgaccctgtgtggctccaacttctaccttcacccttctggtctggtgcctgagggaacccatcaggtcactgtgggccaaagtccctgccggccactgcccaaggacagctcaaaactcagaccagtgccccggaaagactttgtagaggagtttgagtgtgaactggagcccttgggcacccaggcagtggggcctaccaacgtcagcctcaccgtgactaacatgccaccgggcaagcacttccgggtagacggcacctccgtgctgagaggcttctctttcatggagccagtgctgatagcagtgcaacccctctttggcccacgggcaggaggcacctgtctcactcttgaaggccagagtctgtctgtaggcaccagccgggctgtgctggtcaatgggactgagtgtctgctagcacgggtcagtgaggggcagcttttatgtgccacaccccctggggccacggtggccagtgtcccccttagcctgcaggtggggggtgcccaggtacctggttcctggaccttccagtacagagaagaccctgtcgtgctaagcatcagccccaactgtggctacatcaactcccacatcaccatctgtggccagcatctaacttcagcatggcacttagtgctgtcattccatgacgggcttagggcagtggaaagcaggtgtgagaggcagcttccagagcagcagctgtgccgccttcctgaatatgtggtccgagacccccagggatgggtggcagggaatctgagtgcccgaggggatggagctgctggctttacactgcctggctttcgcttcctacccccaccccatccacccagtgccaacctagttccactgaagcctgaggagcatgccattaagtttgagtatattgggctgggcgctgtggctgactgtgtgggtatcaacgtgaccgtgggtggtgagagctgccagcacgagttccggggggacatggttgtctgccccctgcccccatccctgcagcttggccaggatggtgccccattgcaggtctgcgtagatggtgaatgtcatatcctgggtagagtggtgcggccagggccagatggggtcccacagagcacgctccttggtatcctgctgcctttgctgctgcttgtggctgcactggcgactgcactggtcttcagctactggtggcggaggaagcagctagttcttcctcccaacctgaatgacctggcatccctggaccagactgctggagccacacccctgcctattctgtactcgggctctgactacagaagtggccttgcactccctgccattgatggtctggattccaccacttgtgtccatggagcatccttctccgatagtgaagatgaatcctgtgtgccactgctgcggaaagagtccatccagctaagggacctggactctgcgctcttggctgaggtcaaggatgtgctgattccccatgagcgggtggtcacccacagtgaccgagtcattggcaaaggccactttggagttgtctaccacggagaatacatagaccaggcccagaatcgaatccaatgtgccatcaagtcactaagtcgcatcacagagatgcagcaggtggaggccttcctgcgagaggggctgctcatgcgtggcctgaaccacccgaatgtgctggctctcattggtatcatgttgccacctgagggcctgccccatgtgctgctgccctatatgtgccacggtgacctgctccagttcatccgctcacctcagcggaaccccaccgtgaaggacctcatcagctttggcctgcaggtagcccgcggcatggagtacctggcagagcagaagtttgtgcacagggacctggctgcgcggaactgcatgctggacgagtcattcacagtcaaggtggctgactttggtttggcccgcgacatcctggacagggagtactatagtgttcaacagcatcgccacgctcgcctacctgtgaagtggatggcgctggagagcctgcagacctatagatttaccaccaagtctgatgtgtggtcatttggtgtgctgctgtgggaactgctgacacggggtgccccaccataccgccacattgacccttttgaccttacccacttcctggcccagggtcggcgcctgccccagcctgagtattgccctgattctctgtaccaagtgatgcagcaatgctgggaggcagacccagcagtgcgacccaccttcagagtactagtgggggaggtggagcagatagtgtctgcactgcttggggaccattatgtgcagctgccagcaacctacatgaacttgggccccagcacctcgcatgagatgaatgtgcgtccagaacagccgcagttctcacccatgccagggaatgtacgccggccccggccactctcagagcctcctcggcccacttgacttagttcttgggctggacctgcttagctgccttgagctaaccccaaggctgcctctgggccatgccaggccagagcagtggccctccaccttgttcctgccctttaactttcagaggcaataggtaaatgggcccattaggtccctcactccacagagtgagccagtgagggcagtcctgcaacatgtatttatggagtgcctgctgtggaccctgtcttctgggcacagtggactcagcagtgaccacaccaacactgacccttgaaccaataaaggaacaaatgactattaaagcacaaaaaaaaaa

SEQ ID NO: 160 - DNA, 4138 bp, Homo Sapiens
  ref <308>: DATABASE ACCESSION NUMBER: GenBank No. NM000459
  ref <309>: DATABASE ENTRY DATE: 2004-10-26
cttctgtgctgttccttcttgcctctaacttgtaaacaagacgtactaggacgatgctaatggaaagtcacaaaccgctgggtttttgaaaggatccttgggacctcatgcacatttgtggaaactggatggagagatttggggaagcatggactctttagccagcttagttctctgtggagtcagcttgctcctttctggaactgtggaaggtgccatggacttgatcttgatcaattccctacctcttgtatctgatgctgaaacatctctcacctgcattgcctctgggtggcgcccccatgagcccatcaccataggaagggactttgaagccttaatgaaccagcaccaggatccgctggaagttactcaagatgtgaccagagaatgggctaaaaaagttgtttggaagagagaaaaggctagtaagatcaatggtgcttatttctgtgaagggcgagttcgaggagaggcaatcaggatacgaaccatgaagatgcgtcaacaagcttccttcctaccagctactttaactatgactgtggacaagggagataacgtgaacatatctttcaaaaaggtattgattaaagaagaagatgcagtgatttacaaaaatggttccttcatccattcagtgccccggcatgaagtacctgatattctagaagtacacctgcctcatgctcagccccaggatgctggagtgtactcggccaggtatataggaggaaacctcttcacctcggccttcaccaggctgatagtccggagatgtgaagcccagaagtggggacctgaatgcaaccatctctgtactgcttgtatgaacaatggtgtctgccatgaagatactggagaatgcatttgccctcctgggtttatgggaaggacgtgtgagaaggcttgtgaactgcacacgtttggcagaacttgtaaagaaaggtgcagtggacaagagggatgcaagtcttatgtgttctgtctccctgacccctatgggtgttcctgtgccacaggctggaagggtctgcagtgcaatgaagcatgccaccctggtttttacgggccagattgtaagcttaggtgcagctgcaacaatggggagatgtgtgatcgcttccaaggatgtctctgctctccaggatggcaggggctccagtgtgagagagaaggcataccgaggatgaccccaaagatagtggatttgccagatcatatagaagtaaacagtggtaaatttaatcccatttgcaaagcttctggctggccgctacctactaatgaagaaatgaccctggtgaagccggatgggacagtgctccatccaaaagactttaaccatacggatcatttctcagtagccatattcaccatccaccggatcctcccccctgactcaggagtttgggtctgcagtgtgaacacagtggctgggatggtggaaaagcccttcaacatttctgttaaagttcttccaaagcccctgaatgccccaaacgtgattgacactggacataactttgctgtcatcaacatcagctctgagccttactttggggatggaccaatcaaatccaagaagcttctatacaaacccgttaatcactatgaggcttggcaacatattcaagtgacaaatgagattgttacactcaactatttggaacctcggacagaatatgaactctgtgtgcaactggtccgtcgtggagagggtggggaagggcatcctggacctgtgagacgcttcacaacagcttctatcggactccctcctccaagaggtctaaatctcctgcctaaaagtcagaccactctaaatttgacctggcaaccaatatttccaagctcggaagatgacttttatgttgaagtggagagaaggtctgtgcaaaaaagtgatcagcagaatattaaagttccaggcaacttgacttcggtgctacttaacaacttacatcccagggagcagtacgtggtccgagctagagtcaacaccaaggcccagggggaatggagtgaagatctcactgcttggacccttagtgacattcttcctcctcaaccagaaaacatcaagatttccaacattacacactcctcggctgtgatttcttggacaatattggatggctattctatttcttctattactatccgttacaaggttcaaggcaagaatgaagaccagcacgttgatgtgaagataaagaatgccaccatcattcagtatcagctcaagggcctagagcctgaaacagcataccaggtggacatttttgcagagaacaacatagggtcaagcaacccagccttttctcatgaactggtgaccctcccagaatctcaagcaccagcggacctcggaggggggaagatgctgcttatagccatccttggctctgctggaatgacctgcctgactgtgctgttggcctttctgatcatattgcaattgaagagggcaaatgtgcaaaggagaatggcccaagccttccaaaacgtgagggaagaaccagctgtgcagttcaactcagggactctggccctaaacaggaaggtcaaaaacaacccagatcctacaatttatccagtgcttgactggaatgacatcaaatttcaagatgtgattggggagggcaattttggccaagttcttaaggcgcgcatcaagaaggatgggttacggatggatgctgccatcaaaagaatgaaagaatatgcctccaaagatgatcacagggactttgcaggagaactggaagttctttgtaaacttggacaccatccaaacatcatcaatctcttaggagcatgtgaacatcgaggctacttgtacctggccattgagtacgcgccccatggaaaccttctggacttccttcgcaagagccgtgtgctggagacggacccagcatttgccattgccaatagcaccgcgtccacactgtcctcccagcagctccttcacttcgctgccgacgtggcccggggcatggactacttgagccaaaaacagtttatccacagggatctggctgccagaaacattttagttggtgaaaactatgtggcaaaaatagcagattttggattgtcccgaggtcaagaggtgtacgtgaaaaagacaatgggaaggctcccagtgcgctggatggccatcgagtcactgaattacagtgtgtacacaaccaacagtgatgtatggtcctatggtgtgttactatgggagattgttagcttaggaggcacaccctactgcgggatgacttgtgcagaactctacgagaagctgccccagggctacagactggagaagcccctgaactgtgatgatgaggtgtatgatctaatgagacaatgctggcgggagaagccttatgagaggccatcatttgcccagatattggtgtccttaaacagaatgttagaggagcgaaagacctacgtgaataccacgctttatgagaagtttacttatgcaggaattgactgttctgctgaagaagcggcctaggacagaacatctgtataccctctgtttccctttcactggcatgggagacccttgacaactgctgagaaaacatgcctctgccaaaggatgtgatatataagtgtacatatgtgctggaattctaacaagtcataggttaatatttaagacactgaaaaatctaagtgatataaatcagattcttctctctcattttatccctcacctgtagcatgccagtcccgtttcatttagtcatgtgaccactctgtcttgtgtttccacagcctgcaagttcagtccaggatgctaacatctaaaaatagacttaaatctcattgcttacaagcctaagaatctttagagaagtatacataagtttaggataaaataatgggattttcttttcttttctctggtaatattgacttgtatattttaagaaataacagaaagcctgggtgacatttgggagacatgtgacatttatatattgaattaatatccctacatgtattgcacattgtaaaaagttttagttttgatgagttgtgagtttaccttgtatactgtaggcacactttgcactgatatatcatgagtgaataaatgtcttgcctactcaaaaaaaaaaaa

SEQ ID NO: 161 - DNA, 3960 bp, Homo Sapiens
  ref <308>: DATABASE ACCESSION NUMBER: GenBank No. NM005424
  ref <309>: DATABASE ENTRY DATE: 2004-12-18
cacaggctgagcagtcaggcccacagcatctgaccccaggcccagctcgtcctggctggcctgggtcggcctctggagtatggtctggcgggtgccccctttcttgctccccatcctcttcttggcttctcatgtgggcgcggcggtggacctgacgctgctggccaacctgcggctcacggacccccagcgcttcttcctgacttgcgtgtctggggaggccggggcggggaggggctcggacgcctggggcccgcccctgctgctggagaaggacgaccgtatcgtgcgcaccccgcccgggccacccctgcgcctggcgcgcaacggttcgcaccaggtcacgcttcgcggcttctccaagccctcggacctcgtgggcgtcttctcctgcgtgggcggtgctggggcgcggcgcacgcgcgtcatctacgtgcacaacagccctggagcccacctgcttccagacaaggtcacacacactgtgaacaaaggtgacaccgctgtactttctgcacgtgtgcacaaggagaagcagacagacgtgatctggaagagcaacggatcctacttctacaccctggactggcatgaagcccaggatgggcggttcctgctgcagctcccaaatgtgcagccaccatcgagcggcatctacagtgccacttacctggaagccagccccctgggcagcgccttctttcggctcatcgtgcggggttgtggggctgggcgctgggggccaggctgtaccaaggagtgcccaggttgcctacatggaggtgtctgccacgaccatgacggcgaatgtgtatgcccccctggcttcactggcacccgctgtgaacaggcctgcagagagggccgttttgggcagagctgccaggagcagtgcccaggcatatcaggctgccggggcctcaccttctgcctcccagacccctatggctgctcttgtggatctggctggagaggaagccagtgccaagaagcttgtgcccctggtcattttggggctgattgccgactccagtgccagtgtcagaatggtggcacttgtgaccggttcagtggttgtgtctgcccctctgggtggcatggagtgcactgtgagaagtcagaccggatcccccagatcctcaacatggcctcagaactggagttcaacttagagacgatgccccggatcaactgtgcagctgcagggaaccccttccccgtgcggggcagcatagagctacgcaagccagacggcactgtgctcctgtccaccaaggccattgtggagccagagaagaccacagctgagttcgaggtgccccgcttggttcttgcggacagtgggttctgggagtgccgtgtgtccacatctggcggccaagacagccggcgcttcaaggtcaatgtgaaagtgccccccgtgcccctggctgcacctcggctcctgaccaagcagagccgccagcttgtggtctccccgctggtctcgttctctggggatggacccatctccactgtccgcctgcactaccggccccaggacagtaccatggactggtcgaccattgtggtggaccccagtgagaacgtgacgttaatgaacctgaggccaaagacaggatacagtgttcgtgtgcagctgagccggccaggggaaggaggagagggggcctgggggcctcccaccctcatgaccacagactgtcctgagcctttgttgcagccgtggttggagggctggcatgtggaaggcactgaccggctgcgagtgagctggtccttgcccttggtgcccgggccactggtgggcgacggtttcctgctgcgcctgtgggacgggacacgggggcaggagcggcgggagaacgtctcatccccccaggcccgcactgccctcctgacgggactcacgcctggcacccactaccagctggatgtgcagctctaccactgcaccctcctgggcccggcctcgccccctgcacacgtgcttctgccccccagtgggcctccagccccccgacacctccacgcccaggccctctcagactccgagatccagctgacatggaagcacccggaggctctgcctgggccaatatccaagtacgttgtggaggtgcaggtggctgggggtgcaggagacccactgtggatagacgtggacaggcctgaggagacaagcaccatcatccgtggcctcaacgccagcacgcgctacctcttccgcatgcgggccagcattcaggggctcggggactggagcaacacagtagaagagtccaccctgggcaacgggctgcaggctgagggcccagtccaagagagccgggcagctgaagagggcctggatcagcagctgatcctggcggtggtgggctccgtgtctgccacctgcctcaccatcctggccgcccttttaaccctggtgtgcatccgcagaagctgcctgcatcggagacgcaccttcacctaccagtcaggctcgggcgaggagaccatcctgcagttcagctcagggaccttgacacttacccggcggccaaaactgcagcccgagcccctgagctacccagtgctagagtgggaggacatcacctttgaggacctcatcggggaggggaacttcggccaggtcatccgggccatgatcaagaaggacgggctgaagatgaacgcagccatcaaaatgctgaaagagtatgcctctgaaaatgaccatcgtgactttgcgggagaactggaagttctgtgcaaattggggcatcaccccaacatcatcaacctcctgggggcctgtaagaaccgaggttacttgtatatcgctattgaatatgccccctacgggaacctgctagattttctgcggaaaagccgggtcctagagactgacccagcttttgctcgagagcatgggacagcctctacccttagctcccggcagctgctgcgtttcgccagtgatgcggccaatggcatgcagtacctgagtgagaagcagttcatccacagggacctggctgcccggaatgtgctggtcggagagaacctagcctccaagattgcagacttcggcctttctcggggagaggaggtttatgtgaagaagacgatggggcgtctccctgtgcgctggatggccattgagtccctgaactacagtgtctataccaccaagagtgatgtctggtcctttggagtccttctttgggagatagtgagccttggaggtacaccctactgtggcatgacctgtgccgagctctatgaaaagctgccccagggctaccgcatggagcagcctcgaaactgtgacgatgaagtgtacgagctgatgcgtcagtgctggcgggaccgtccctatgagcgacccccctttgcccagattgcgctacagctaggccgcatgctggaagccaggaaggcctatgtgaacatgtcgctgtttgagaacttcacttacgcgggcattgatgccacagctgaggaggcctgagctgccatccagccagaacgtggctctgctggccggagcaaactctgctgtctaacctgtgaccagtctgacccttacagcctctgacttaagctgcctcaaggaatttttttaacttaagggagaaaaaaagggatctggggatggggtgggcttaggggaactgggttcccatgctttgtaggtgtctcatagctatcctgggcatccttctttctagttcagctgccccacaggtgtgtttcccatcccactgctcccccaacacaaacccccactccagctccttcgcttaagccagcactcacaccactaacatgccctgttcagctactcccactcccggcctgtcattcagaaaaaaataaatgttctaataagctccaaaaaaaaaaaaaaaaaaaaaaaaaaaaaaaaaaaaaaaaaaaaaaaaaaaaaaaaaaaaaaaaaaaaaaaaaaaaaaa

SEQ ID NO: 162 - DNA, 3985 bp, Homo Sapiens
  ref <308>: DATABASE ACCESSION NUMBER: GenBank No. NM005211
  ref <309>: DATABASE ENTRY DATE: 2004-10-26
gaagggcagacagagtgtccaaaagcgtgagagcacgaagtgaggagaaggtggagaagagagaagaggaagaggaagaggaagagaggaagcggagggaactgcggccaggctaaaaggggaagaagaggatcagcccaaggaggaggaagaggaaaacaagacaaacagccagtgcagaggagaggaacgtgtgtccagtgtcccgatccctgcggagctagtagctgagagctctgtgccctgggcaccttgcagccctgcacctgcctgccacttccccaccgaggccatgggcccaggagttctgctgctcctgctggtggccacagcttggcatggtcagggaatcccagtgatagagcccagtgtccctgagctggtcgtgaagccaggagcaacggtgaccttgcgatgtgtgggcaatggcagcgtggaatgggatggccccccatcacctcactggaccctgtactctgatggctccagcagcatcctcagcaccaacaacgctaccttccaaaacacggggacctatcgctgcactgagcctggagaccccctgggaggcagcgccgccatccacctctatgtcaaagaccctgcccggccctggaacgtgctagcacaggaggtggtcgtgttcgaggaccaggacgcactactgccctgtctgctcacagacccggtgctggaagcaggcgtctcgctggtgcgtgtgcgtggccggcccctcatgcgccacaccaactactccttctcgccctggcatggcttcaccatccacagggccaagttcattcagagccaggactatcaatgcagtgccctgatgggtggcaggaaggtgatgtccatcagcatccggctgaaagtgcagaaagtcatcccagggcccccagccttgacactggtgcctgcagagctggtgcggattcgaggggaggctgcccagatcgtgtgctcagccagcagcgttgatgttaactttgatgtcttcctccaacacaacaacaccaagctcgcaatccctcaacaatctgactttcataataaccgttaccaaaaagtcctgaccctcaacctcgatcaagtagatttccaacatgccggcaactactcctgcgtggccagcaacgtgcagggcaagcactccacctccatgttcttccgggtggtagagagtgcctacttgaacttgagctctgagcagaacctcatccaggaggtgaccgtgggggaggggctcaacctcaaagtcatggtggaggcctacccaggcctgcaaggttttaactggacctacctgggacccttttctgaccaccagcctgagcccaagcttgctaatgctaccaccaaggacacatacaggcacaccttcaccctctctctgccccgcctgaagccctctgaggctggccgctactccttcctggccagaaacccaggaggctggagagctctgacgtttgagctcacccttcgataccccccagaggtaagcgtcatatggacattcatcaacggctctggcacccttttgtgtgctgcctctgggtacccccagcccaacgtgacatggctgcagtgcagtggccacactgataggtgtgatgaggcccaagtgctgcaggtctgggatgacccataccctgaggtcctgagccaggagcccttccacaaggtgacggtgcagagcctgctgactgttgagaccttagagcacaaccaaacctacgagtgcagggcccacaacagcgtggggagtggctcctgggccttcatacccatctctgcaggagcccacacgcatcccccggatgagttcctcttcacaccagtggtggtcgcctgcatgtccatcatggccttgctgctgctgctgctcctgctgctattgtacaagtataagcagaagcccaagtaccaggtccgctggaagatcatcgagagctatgagggcaacagttatactttcatcgaccccacgcagctgccttacaacgagaagtgggagttcccccggaacaacctgcagtttggtaagaccctcggagctggagcctttgggaaggtggtggaggccacggcctttggtctgggcaaggaggatgctgtcctgaaggtggctgtgaagatgctgaagtccacggcccatgctgatgagaaggaggccctcatgtccgagctgaagatcatgagccacctgggccagcacgagaacatcgtcaaccttctgggagcctgtacccatggaggccctgtactggtcatcacggagtactgttgctatggcgacctgctcaactttctgcgaaggaaggctgaggccatgctgggacccagcctgagccccggccaggaccccgagggaggcgtcgactataagaacatccacctcgagaagaaatatgtccgcagggacagtggcttctccagccagggtgtggacacctatgtggagatgaggcctgtctccacttcttcaaatgactccttctctgagcaagacctggacaaggaggatggacggcccctggagctccgggacctgcttcacttctccagccaagtagcccagggcatggccttcctcgcttccaagaattgcatccaccgggacgtggcagcgcgtaacgtgctgttgaccaatggtcatgtggccaagattggggacttcgggctggctagggacatcatgaatgactccaactacattgtcaagggcaatgcccgcctgcctgtgaagtggatggccccagagagcatctttgactgtgtctacacggttcagagcgacgtctggtcctatggcatcctcctctgggagatcttctcacttgggctgaatccctaccctggcatcctggtgaacagcaagttctataaactggtgaaggatggataccaaatggcccagcctgcatttgccccaaagaatatatacagcatcatgcaggcctgctgggccttggagcccacccacagacccaccttccagcagatctgctccttccttcaggagcaggcccaagaggacaggagagagcgggactataccaatctgccgagcagcagcagaagcggtggcagcggcagcagcagcagtgagctggaggaggagagctctagtgagcacctgacctgctgcgagcaaggggatatcgcccagcccttgctgcagcccaacaactatcagttctgctgaggagttgacgacagggagtaccactctcccctcctccaaacttcaactcctccatggatggggcgacacggggagaacatacaaactctgccttcggtcatttcactcaacagctcggcccagctctgaaacttgggaaggtgagggattcaggggaggtcagaggatcccacttcctgagcatgggccatcactgccagtcaggggctgggggctgagccctcacccccccctcccctactgttctcatggtgttggcctcgtgtttgctatgccaactagtagaaccttctttcctaatccccttatcttcatggaaatggactgactttatgcctatgaagtccccaggagctacactgatactgagaaaaccaggctctttggggctagacagactggcagagagtgagatctccctctctgagaggagcagcagatgctcacagaccacactcagctcaggccccttggagcaggatggctcctctaagaatctcacaggacctcttagtctctgccctatacgccgccttcactccacagcctcacccctcccacccccatactggtactgctgtaatgagccaagtggcagctaaaagttgggggtgttctgcccagtcccgtcattctgggctagaaggcaggggaccttggcatgtggctggccacaccaagcaggaagcacaaactcccccaagctgactcatcctaactaacagtcacgccgtgggatgtctctgtccacattaaactaacagcattaatgca

SEQ ID NO: 163 - DNA, 5598 bp, Homo Sapiens
  ref <308>: DATABASE ACCESSION NUMBER: GenBank No. NM002609
  ref <309>: DATABASE ENTRY DATE: 2004-10-26
ggcccctcagccctgctgcccagcacgagcctgtgctcgccctgcccaacgcagacagccagacccagggcggcccctctggcggctctgctcctcccgaaggatgcttggggagtgaggcgaagctgggcgctcctctcccctacagcagcccccttcctccatccctctgttctcctgagccttcaggagcctgcaccagtcctgcctgtccttctactcagctgttacccactctgggaccagcagtctttctgataactgggagagggcagtaaggaggacttcctggagggggtgactgtccagagcctggaactgtgcccacaccagaagccatcagcagcaaggacaccatgcggcttccgggtgcgatgccagctctggccctcaaaggcgagctgctgttgctgtctctcctgttacttctggaaccacagatctctcagggcctggtcgtcacacccccggggccagagcttgtcctcaatgtctccagcaccttcgttctgacctgctcgggttcagctccggtggtgtgggaacggatgtcccaggagcccccacaggaaatggccaaggcccaggatggcaccttctccagcgtgctcacactgaccaacctcactgggctagacacgggagaatacttttgcacccacaatgactcccgtggactggagaccgatgagcggaaacggctctacatctttgtgccagatcccaccgtgggcttcctccctaatgatgccgaggaactattcatctttctcacggaaataactgagatcaccattccatgccgagtaacagacccacagctggtggtgacactgcacgagaagaaaggggacgttgcactgcctgtcccctatgatcaccaacgtggcttttctggtatctttgaggacagaagctacatctgcaaaaccaccattggggacagggaggtggattctgatgcctactatgtctacagactccaggtgtcatccatcaacgtctctgtgaacgcagtgcagactgtggtccgccagggtgagaacatcaccctcatgtgcattgtgatcgggaatgaggtggtcaacttcgagtggacatacccccgcaaagaaagtgggcggctggtggagccggtgactgacttcctcttggatatgccttaccacatccgctccatcctgcacatccccagtgccgagttagaagactcggggacctacacctgcaatgtgacggagagtgtgaatgaccatcaggatgaaaaggccatcaacatcaccgtggttgagagcggctacgtgcggctcctgggagaggtgggcacactacaatttgctgagctgcatcggagccggacactgcaggtagtgttcgaggcctacccaccgcccactgtcctgtggttcaaagacaaccgcaccctgggcgactccagcgctggcgaaatcgccctgtccacgcgcaacgtgtcggagacccggtatgtgtcagagctgacactggttcgcgtgaaggtggcagaggctggccactacaccatgcgggccttccatgaggatgctgaggtccagctctccttccagctacagatcaatgtccctgtccgagtgctggagctaagtgagagccaccctgacagtggggaacagacagtccgctgtcgtggccggggcatgccccagccgaacatcatctggtctgcctgcagagacctcaaaaggtgtccacgtgagctgccgcccacgctgctggggaacagttccgaagaggagagccagctggagactaacgtgacgtactgggaggaggagcaggagtttgaggtggtgagcacactgcgtctgcagcacgtggatcggccactgtcggtgcgctgcacgctgcgcaacgctgtgggccaggacacgcaggaggtcatcgtggtgccacactccttgccctttaaggtggtggtgatctcagccatcctggccctggtggtgctcaccatcatctcccttatcatcctcatcatgctttggcagaagaagccacgttacgagatccgatggaaggtgattgagtctgtgagctctgacggccatgagtacatctacgtggaccccatgcagctgccctatgactccacgtgggagctgccgcgggaccagcttgtgctgggacgcaccctcggctctggggcctttgggcaggtggtggaggccacggctcatggcctgagccattctcaggccacgatgaaagtggccgtcaagatgcttaaatccacagcccgcagcagtgagaagcaagcccttatgtcggagctgaagatcatgagtcaccttgggccccacctgaacgtggtcaacctgttgggggcctgcaccaaaggaggacccatctatatcatcactgagtactgccgctacggagacctggtggactacctgcaccgcaacaaacacaccttcctgcagcaccactccgacaagcgccgcccgcccagcgcggagctctacagcaatgctctgcccgttgggctccccctgcccagccatgtgtccttgaccggggagagcgacggtggctacatggacatgagcaaggacgagtcggtggactatgtgcccatgctggacatgaaaggagacgtcaaatatgcagacatcgagtcctccaactacatggccccttacgataactacgttccctctgcccctgagaggacctgccgagcaactttgatcaacgagtctccagtgctaagctacatggacctcgtgggcttcagctaccaggtggccaatggcatggagtttctggcctccaagaactgcgtccacagagacctggcggctaggaacgtgctcatctgtgaaggcaagctggtcaagatctgtgactttggcctggctcgagacatcatgcgggactcgaattacatctccaaaggcagcacctttttgcctttaaagtggatggctccggagagcatcttcaacagcctctacaccaccctgagcgacgtgtggtccttcgggatcctgctctgggagatcttcaccttgggtggcaccccttacccagagctgcccatgaacgagcagttctacaatgccatcaaacggggttaccgcatggcccagcctgcccatgcctccgacgagatctatgagatcatgcagaagtgctgggaagagaagtttgagattcggccccccttctcccagctggtgctgcttctcgagagactgttgggcgaaggttacaaaaagaagtaccagcaggtggatgaggagtttctgaggagtgaccacccagccatccttcggtcccaggcccgcttgcctgggttccatggcctccgatctcccctggacaccagctccgtcctctatactgccgtgcagcccaatgagggtgacaacgactatatcatccccctgcctgaccccaaacccgaggttgctgacgagggcccactggagggttcccccagcctagccagctccaccctgaatgaagtcaacacctcctcaaccatctcctgtgacagccccctggagccccaggacgaaccagagccagagccccagcttgagctccaggtggagccggagccagagctggaacagttgccggattcggggtgccctgcgcctcgggcggaagcagaggatagcttcctgtagggggctggcccctaccctgccctgcctgaagctccccccctgccagcacccagcatctcctggcctggcctgaccgggcttcctgtcagccaggctgcccttatcagctgtccccttctggaagctttctgctcctgacgtgttgtgccccaaaccctggggctggcttaggaggcaagaaaactgcaggggccgtgaccagccctctgcctccagggaggccaactgactctgagccagggttcccccagggaactcagttttcccatatgtaagatgggaaagttaggcttgatgacccagaatctaggattctctccctggctgacaggtggggagaccgaatccctccctgggaagattcttggagttactgaggtggtaaattaacttttttctgttcagccagctacccctcaaggaatcatagctctctcctcgcactttttatccacccaggagctagggaagagaccctagcctccctggctgctggctgagctagggcctagccttgagcagtgttgcctcatccagaagaaagccagtctcctccctatgatgccagtccctgcgttccctggcccgagctggtctggggccattaggcagcctaattaatgctggaggctgagccaagtacaggacacccccagcctgcagcccttgcccagggcacttggagcacacgcagccatagcaagtgcctgtgtccctgtccttcaggcccatcagtcctggggctttttctttatcaccctcagtcttaatccatccaccagagtctagaaggccagacgggccccgcatctgtgatgagaatgtaaatgtgccagtgtggagtggccacgtgtgtgtgccagtatatggccctggctctgcattggacctgctatgaggctttggaggaatccctcaccctctctgggcctcagtttccccttcaaaaaatgaataagtcggacttattaactctgagtgccttgccagcactaacattctagagtattccaggtggttgcacatttgtccagatgaagcaaggccatataccctaaacttccatcctgggggtcagctgggctcctgggagattccagatcacacatcacactctggggactcaggaaccatgccccttccccaggcccccagcaagtctcaagaacacagctgcacaggccttgacttagagtgacagccggtgtcctggaaagccccaagcagctgccccagggacatgggaagaccacgggacctctttcactacccacgatgacctccgggggtatcctgggcaaaagggacaaagagggcaaatgagatcacctcctgcagcccaccactccagcacctgtgccgaggtctgcgtcgaagacagaatggacagtgaggacagttatgtcttgtaaaagacaagaagcttcagatggtaccccaagaaggatgtgagaggtggccgcttggagtttgcccctcacccaccagctgccccatccctgaggcagcgctccatgggggtatggttttgtcactgcccagacctagcagtgacatctcattgtccccagcccagtgggcattggaggtgccaggggagtcagggttgtagccaagacgcccccgcacggggagggttgggaagggggtgcaggaagctcaacccctctgggcaccaaccctgcattgcaggttggcaccttacttccctgggatccccagagttggtccaaggagggagagtgggttctcaatacggtaccaaagatataatcacctaggtttacaaatatttttaggactcacgttaactcacatttatacagcagaaatgctattttgtatgctgttaagtttttctatctgtgtacttttttttaagggaaagattttaatattaaacctggtgcttctcactcac

SEQ ID NO: 164 - DNA, 3343 bp, Homo Sapiens
  ref <308>: DATABASE ACCESSION NUMBER: GenBank No. M34641
  ref <309>: DATABASE ENTRY DATE: 2001-12-14
gaattcgggatgtggagctggaagtgcctcctcttctgggctgtgctggtcacagccacactctgcaccgctaggccgtccccgaccttgcctgaacaagcccagccctggggagcccctgtggaagtggagtccttcctggtccaccccggtgacctgctgcagcttcgctgtcggctgcgggacgatgtgcagagcatcaactggctgcgggacggggtgcagctggcggaaagcaaccgcacccgcatcacaggggaggaggtggaggtgcaggactccgtgcccgcagactccggcctctatgcttgcgtaaccagcagcccctcgggcagtgacaccacctacttctccgtcaatgtttcagatgctctcccctcctcggaggatgatgatgatgatgatgactcctcttcagaggagaaagaaacagataacaccaaaccaaaccccgtagctccatattggacatccccagaaaagatggaaaagaaattgcatgcagtgccggctgccaagacagtgaagttcaaatgcccttccagtgggaccccaaaccccacactgcgctggttgaaaaatagcaaagaattcaaacctgaccacagaattggaggctacaaggtccgttatgccacctggagcatcataatggactctgtggtgccctctgacaagggcaactacacctgcattgtggagaatgagtacggcagcatcaaccacacataccagctggatgtcgtggagcggtcccctcaccggcccatcctgcaagcagggttgcccgccaacaaaacagtggccctgggtagcaacgtggagttcatgtgtaaggtgtacagtgacccgcagccgcacatccagtggctaaagcacatcgaggtgaatgggagcaagattggcccagacaacctgccttatgtccagatcttgaagactgctggagttaataccaccgacaaagagatggaggtgcttcacttaagaaatgtctcctttgaggacgcaggggagtatacgtgcttggcgggtaactctatcggactctcccatcactctgcatggttgaccgttctggaagccctggaagagaggccggcagtgatgacctcgcccctgtacctggagatcatcatctattgcacaggggccttcctcatctcctgcatggtggggtcggtcatcgtctacaagatgaagagtggtaccaagaagagtgacttccacagccagatggctgtgcacaagctggccaagagcatccctctgcgcagacaggtaacagtgtctgctgactccagtgcatccatgaactctggggttcttctggttcggccatcacggctctcctccagtgggactcccatgctagcaggggtctctgagtatgagcttcccgaagaccctcgctgggagctgcctcgggacagactggtcttaggcaaacccctgggagagggctgctttgggcaggtggtgttggcagaggctatcgggctggacaaggacaaacccaaccgtgtgaccaaagtggctgtgaagatgttgaagtcggacgcaacagagaaagacttgtcagacctgatctcagaaatggagatgatgaagatgatcgggaagcataagaatatcatcaacctgctgggggcctgcacgcaggatggtcccttgtatgtcatcgtggagtatgcctccaagggcaacctgcgggagtacctgcaggcccggaggcccccagggctggaatactgctacaaccccagccacaacccagaggagcagctctcctccaaggacctggtgtcctgcgcctaccaggtggcccgaggcatggagtatctggcctccaagaagtgcatacaccgagacctggcagccaggaatgtcctggtgacagaggacaatgtgatgaagatagcagactttggcctcgcacgggacattcaccacatcgactactataaaaagacaaccaacggccgactgcctgtgaagtggatggcacccgaggcattatttgaccggatctacacccaccagagtgatgtgtggtctttcggggtgctcctgtgggagatcttcactctgggcggctccccataccccggtgtgcctgtggaggaacttttcaagctgctgaaggagggtcaccgcatggacaagcccagtaactgcaccaacgagctgtacatgatgatgcgggactgctggcatgcagtgccctcacagagacccaccttcaagcagctggtggaagacctggaccgcatcgtggccttgacctccaaccaggagtacctggacctgtccatgcccctggaccagtactcccccagctttcccgacacccggagctctacgtgctcctcaggggaggattccgtcttctctcatgagccgctgcccgaggagccctgcctgccccgacacccagcccagcttgccaatggcggactcaaacgccgctgactgccacccacacgccctccccagactccaccgtcagctgtaaccctcacccacagcccctgctgggcccaccacctgtccgtccctgtcccctttcctgctggcaggagccggctgcctaccaggggccttcctgtgtggcctgccttcaccccactcagctcacctctccctccacctcctctccacctgctggtgagaggtgcaaagaggcagatctttgctgccagccacttcatcccctcccagatgttggaccaacacccctccctgccacagcatcgcctggagggcagggagtgggagccaatgaacaggcatgcaagtgagagcttcctgagctttctctgtcggtttggtctgttttgccttcacccataagcccctcgcactctggtggcaggtgccttgtcctcagggctacagcagtagggaggtcagtgcttcgtgcctcgattgaaggtgacctctgccccagataggtggtgcagtggcttattaattccgatactagtttgctttgctgaccaaatgcctggtaccagaggatggtgaggcgaaggccaggttgggggcagtgttgtggccctggggccagccccaaactgggggctctgtatatagctatgaagaaaacacaaagtgtataaatctgagtatatatttacatgtctttttaaaagggtcgttaccagagatttacccatcgggtaagatgctcctggtggctgggaggcatcagttgctatatattaaaaacaaaaaagaaaaaaaaggaaaatgtttttaaaaaggtcatatattttttgctacttttgctgttttatttttttaaattatgttctaaactcgtgccgctcgtgccgaattc

SEQ ID NO: 165 - DNA, 3363 bp, Homo Sapiens
  ref <308>: DATABASE ACCESSION NUMBER: GenBank No. NM005232
  ref <309>: DATABASE ENTRY DATE: 2004-11-29
gcccccgcccggcccgccccgctctcctagtcccttgcaacctggcgctgccatccgggccactgtcccaggtcccggcccggagctatggagcggcgctggcccctggggctagggctggtgctgctgctctgcgccccgctgcccccgggggcgcgcgccaaggaagttactctgatggacacaagcaaggcacagggagagctgggctggctgctggatcccccaaaagatgggtggagtgaacagcaacagatactgaatgggacacccctgtacatgtaccaggactgcccaatgcaaggacgcagagacactgaccactggcttcgctccaattggatctaccgcggggaggaggcttcccgcgtccacgtggagctgcagttcaccgtgcgggactgcaagagtttccctgggggagccgggcctctgggctgcaaggagaccttcaaccttctgtacatggagagtgaccaggatgtgggcattcagctccgacggcccttgttccagaaggtaaccacggtggctgcagaccagagcttcaccattcgagaccttgcgtctggctccgtgaagctgaatgtggagcgctgctctctgggccgcctgacccgccgtggcctctacctcgctttccacaacccgggtgcctgtgtggccctggtgtctgtccgggtcttctaccagcgctgtcctgagaccctgaatggcttggcccaattcccagacactctgcctggccccgctgggttggtggaagtggcggggacctgcttgccccacgcgcgggccagccccaggccctcaggtgcaccccgcatgcactgcagccctgatggcgagtggctggtgcctgtaggacggtgccactgtgagcctggctatgaggaaggtggcagtggcgaagcatgtgttgcctgccctagcggctcctaccggatggacatggacacaccccattgtctcacgtgcccccagcagagcactgctgagtctgagggggccaccatctgtacctgtgagagcggccattacagagctcccggggagggcccccaggtggcatgcacaggtcccccctcggccccccgaaacctgagcttctctgcctcagggactcagctctccctgcgttgggaacccccagcagatacggggggacgccaggatgtcagatacagtgtgaggtgttcccagtgtcagggcacagcacaggacggggggccctgccagccctgtggggtgggcgtgcacttctcgccgggggcccgggcgctcaccacacctgcagtgcatgtcaatggccttgaaccttatgccaactacacctttaatgtggaagcccaaaatggagtgtcagggctgggcagctctggccatgccagcacctcagtcagcatcagcatggggcatgcagagtcactgtcaggcctgtctctgagactggtgaagaaagaaccgaggcaactagagctgacctgggcggggtcccggccccgaagccctggggcgaacctgacctatgagctgcacgtgctgaaccaggatgaagaacggtaccagatggttctagaacccagggtcttgctgacagagctgcagcctgacaccacatacatcgtcagagtccgaatgctgaccccactgggtcctggccctttctcccctgatcatgagtttcggaccagcccaccagtgtccaggggcctgactggaggagagattgtagccgtcatctttgggctgctgcttggtgcagccttgctgcttgggattctcgttttccggtccaggagagcccagcggcagaggcagcagaggcagcgtgaccgcgccaccgatgtggatcgagaggacaagctgtggctgaagccttatgtggacctccaggcatacgaggaccctgcacagggagccttggactttacccgggagcttgatccagcgtggctgatggtggacactgtcataggagaaggagagtttggggaagtgtatcgagggaccctgaggctccccagccaggactgcaagactgtggccattaagaccttaaaagacacatccccaggtggccagtggtggaacttccttcgagaggcaactatcatgggccagtttagccacccgcatattctgcatctggaaggcgtcgtcacaaagcgaaagccgatcatgatcatcacagaatttatggagaatggagccctggatgccttcctgagggagcgggaggaccagctggtccctgggcagctagtggccatgctgcagggcatagcatctggcatgaactacctcagtaatcacaattatgtccaccgggacctggctgccagaaacatcttggtgaatcaaaacctgtgctgcaaggtgtctgactttggcctgactcgcctcctggatgactttgatggcacatacgaaacccagggaggaaagatccctatccgttggacagcccctgaagccattgcccatcggatcttcaccacagccagcgatgtgtggagctttgggattgtgatgtgggaggtgctgagctttggggacaagccttatggggagatgagcaatcaggaggttatgaagagcattgaggatgggtaccggttgccccctcctgtggactgccctgcccctctgtatgagctcatgaagaactgctgggcatatgaccgtgcccgccggccacacttccagaagcttcaggcacatctggagcaactgcttgccaacccccactccctgcggaccattgccaactttgaccccagggtgactcttcgcctgcccagcctgagtggctcagatgggatcccgtatcgaaccgtctctgagtggctcgagtccatacgcatgaaacgctacatcctgcacttccactcggctgggctggacaccatggagtgtgtgctggagctgaccgctgaggacctgacgcagatgggaatcacactgcccgggcaccagaagcgcattctttgcagtattcagggattcaaggactgatccctcctctcaccccatgcccaatcagggtgcaaggagcaaggacggggccaaggtcgctcatggtcactccctgcgccccttcccacaacctgccagactaggctatcggtgctgcttctgcccactttcaggagaaccctgctctgcaccccagaaaacctctttgttttaaaagggaggtgggggtagaagtaaaaggatgatcatgggagggagctgaggggttaatatatatacatacatacacatatatatatttttgtaaataaacaggaactgattttctgcctccatcccacccatgagggctgcaggcactacaaaagagctgactactgagaa

SEQ ID NO: 166 - DNA, 3865 bp, Homo Sapiens
  ref <308>: DATABASE ACCESSION NUMBER: GenBank No. NM004441
  ref <309>: DATABASE ENTRY DATE: 2004-11-15
cacatgcacacccacacccacgcgcgcccgcaccgccccacgcgcacacactcctgcccacgcccacgcagcgctccgggaagtccggtccgggcgagagcgcgaaaggataccgagaagccacccgcggagagcgcagcggcgccctgggacgcggcgctctcccggcgctgctgcctcggcttggtctcggcctgcgggccgtcggccggcgatggccctggattatctactactgctcctcctggcatccgcagtggctgcgatggaagaaacgttaatggacaccagaacggctactgcagagctgggctggacggccaatcctgcgtccgggtgggaagaagtcagtggctacgatgaaaacctgaacaccatccgcacctaccaggtgtgcaatgtcttcgagcccaaccagaacaattggctgctcaccaccttcatcaaccggcggggggcccatcgcatctacacagagatgcgcttcactgtgagagactgcagcagcctccctaatgtcccaggatcctgcaaggagaccttcaacttgtattactatgagactgactctgtcattgccaccaagaagtcagccttctggtctgaggccccctacctcaaagtagacaccattgctgcagatgagagcttctcccaggtggactttgggggaaggctgatgaaggtaaacacagaagtcaggagctttgggcctcttactcggaatggtttttacctcgcttttcaggattatggagcctgtatgtctcttctttctgtccgtgtcttcttcaaaaagtgtcccagcattgtgcaaaattttgcagtgtttccagagactatgacaggggcagagagcacatctctggtgattgctcggggcacatgcatccccaacgcagaggaagtggacgtgcccatcaaactctactgcaacggggatggggaatggatggtgcctattgggcgatgcacctgcaagcctggctatgagcctgagaacagcgtggcatgcaaggcttgccctgcagggacattcaaggccagccaggaagctgaaggctgctcccactgcccctccaacagccgctcccctgcagaggcgtctcccatctgcacctgtcggaccggttattaccgagcggactttgaccctccagaagtggcatgcactagcgtcccatcaggtccccgcaatgttatctccatcgtcaatgagacgtccatcattctggagtggcaccctccaagggagacaggtgggcgggatgatgtgacctacaacatcatctgcaaaaagtgccgggcagaccgccggagctgctcccgctgtgacgacaatgtggagtttgtgcccaggcagctgggcctgacggagtgccgcgtctccatcagcagcctgtgggcccacaccccctacacctttgacatccaggccatcaatggagtctccagcaagagtcccttccccccacagcacgtctctgtcaacatcaccacaaaccaagccgccccctccaccgttcccatcatgcaccaagtcagtgccactatgaggagcatcaccttgtcatggccacagccggagcagcccaatggcatcatcctggactatgagatccggtactatgagaaggaacacaatgagttcaactcctccatggccaggagtcagaccaacacagcaaggattgatgggctgcggcctggcatggtatatgtggtacaggtgcgtgcccgcactgttgctggctacggcaagttcagtggcaagatgtgcttccagactctgactgacgatgattacaagtcagagctgagggagcagctgcccctgattgctggctcggcagcggccggggtcgtgttcgttgtgtccttggtggccatctctatcgtctgtagcaggaaacgggcttatagcaaagaggctgtgtacagcgataagctccagcattacagcacaggccgaggctccccagggatgaagatctacattgaccccttcacttatgaggatcccaacgaagctgtccgggagtttgccaaggagattgatgtatcttttgtgaaaattgaagaggtcatcggagcaggggagtttggagaagtgtacaaggggcgtttgaaactgccaggcaagagggaaatctacgtggccatcaagaccctgaaggcagggtactcggagaagcagcgtcgggactttctgagtgaggcgagcatcatgggccagttcgaccatcctaacatcattcgcctggagggtgtggtcaccaagagtcggcctgtcatgatcatcacagagttcatggagaatggtgcattggattctttcctcaggcaaaatgacgggcagttcaccgtgatccagcttgtgggtatgctcaggggcatcgctgctggcatgaagtacctggctgagatgaattatgtgcatcgggacctggctgctaggaacattctggtcaacagtaacctggtgtgcaaggtgtccgactttggcctctcccgctacctccaggatgacacctcagatcccacctacaccagctccttgggagggaagatccctgtgagatggacagctccagaggccatcgcctaccgcaagttcacttcagccagcgacgtttggagctatgggatcgtcatgtgggaagtcatgtcatttggagagagaccctattgggatatgtccaaccaagatgtcatcaatgccatcgagcaggactaccggctgcccccacccatggactgtccagctgctctacaccagctcatgctggactgttggcagaaggaccggaacagccggccccggtttgcggagattgtcaacaccctagataagatgatccggaacccggcaagtctcaagactgtggcaaccatcaccgccgtgccttcccagcccctgctcgaccgctccatcccagacttcacggcctttaccaccgtggatgactggctcagcgccatcaaaatggtccagtacagggacagcttcctcactgctggcttcacctccctccagctggtcacccagatgacatcagaagacctcctgagaataggcatcaccttggcaggccatcagaagaagatcctgaacagcattcattctatgagggtccagataagtcagtcaccaacggcaatggcatgagaactcttgtttcttggggaaggagaggagggaaaaggaccagggtcaagggggaccagaggttgaccactgtggaatgtactggagagactggcttctcagctgaggaatgcatttccatcagtgaagaatcaaccggacctgttgctagcaggcaatctccatttctcagtgacagaagcatgtttgagatgccgtgggaaaccaaatatataataataaaaatataaaaaggtgatgttcaacagaagtgaagacaaaacaatatgcatcaggagaacaagagtaaacccagctcccactctcagtgggctgcagttgcccaaccacaggaagaaagggaaggaggtagagggaagaaacagaagcagtgttccattttcttcctcaccaatgacattcttttcttttctcctttcgtactcctccctgagagtcccctcccttctcccacactcgtttccctttgctcatgactcctgtagggaagtttcttcaaacaaaacccagctcctgagtctccagatgttgttctgtcagttgccaaaggactttgctgaccactgcatggggatccaaccaattcaattaatgtcttcatattgaagaagagatgtaccttcaattgaaaacctcgtttttcttttgtttgcattttctgcaaaaaggaaaaagaaaccacaaattggggaattc

SEQ ID NO: 167 - DNA, 1721 bp, Homo Sapiens
ctctctggctactagagacccactgcttactggcttatcgaaattaatacgactcactatagggagacccaagctggctagttaagcttggtaccgagctcggatccaccatggagctccaggcagcccgcgcctgcttcgccctgctgtggggctgtgcgctggccgcggccgcggcggcgcagggcaaggaagtggtactgctggactttgctgcagctggaggggagctcggctggctcacacacccgtatggcaaagggtgggacctgatgcagaacatcatgaatgacatgccgatctacatgtactccgtgtgcaacgtgatgtctggcgaccaggacaactggctccgcaccaactgggtgtaccgaggagaggctgagcgtatcttcattgagctcaagtttactgtacgtgactgcaacagcttccctggtggcgccagctcctgcaaggagactttcaacctctactatgccgagtcggacctggactacggcaccaacttccagaagcgcctgttcaccaagattgacaccattgcgcccgatgagatcaccgtcagcagcgacttcgaggcacgccacgtgaagctgaacgtggaggagcgctccgtggggccgctcacccgcaaaggcttctacctggccttccaggatatcggtgcctgtgtggcactactctccgtccgtgtctactacgagaagtgccccgagccgctgcagggcctggcccacttccctgagaccatcgccggctctgatgcaccttccctggccactgtggccggcacctgtgtggaccatgccgtggtgccaccggggggtgaagagccccgtatgcactgtgcagtggatggcgagtggctggtgcccattgggcagtgcctgtgccaggcaggctacgagaaggtggaggatgcctgccaggcctgctcgcctggattttttaagtttgaggcatccgagagcccctgcttggagtgccctgagcgcacgctgccatcccctgagggtgccacctcctgcgagtgtgaggaaggcttcttccgggcacctcaggacccagcgtcgatgccttgcacacgacccccttccgccccacactacctcacagccgtgggcatgggtgccaaggtggagctgcgctggacgccccctcaggacagcgggggccgcgaggacattgtctacagcgtcacctgcgaacagtgctggcccgagtctggggaatgcgggccgtgtgaggccagtgtgcgctactcggagcctcctcacggactgacccgcaccagtgtgacagtgagcgacctggagccccacatgaactacaccttcaccgtggaggcccgcaatggcgtctcaggcctggtaaccagccgcagcttccgtactgccagtgtcagcatcaaccagacagagccccccaaggtgaggctggagggccgcagcaccacctcgcttagcgtctcctggagcatccccccgccgcagcagagccgagtgtggaagtacgaggtcacttaccgcaagaaggtaactcccagaggggcggggctggctctagctgggccgacagcaggggacaggctggtcacactcgagtctagagggcccttcgaacaaaaactcatctcagaagaggatctgaatatgcataccggtcatcatcaccatcaccattgagtttaaacccgctgatcagcctcgactgtgcct

SEQ ID NO: 168 - protein, 497 aa, Homo Sapiens
MELQAARACFALLWGCALAAAAAAQGKEVVLLDFAAAGGELGWLTHPYGKGWDLMQNIMNDMPIYMYSVCNVMSGDQDNWLRTNWVYRGEAERIFIELKFTVRDCNSFPGGASSCKETFNLYYAESDLDYGTNFQKRLFTKIDTIAPDEITVSSDFEARHVKLNVEERSVGPLTRKGFYLAFQDIGACVALLSVRVYYEKCPEPLQGLAHFPETIAGSDAPSLATVAGTCVDHAVVPPGGEEPRMHCAVDGEWLVPIGQCLCQAGYEKVEDACQACSPGFFKFEASESPCLECPERTLPSPEGATSCECEEGFFRAPQDPASMPCTRPPSAPHYLTAVGMGAKVELRWTPPQDSGGREDIVYSVTCEQCWPESGECGPCEASVRYSEPPHGLTRTSVTVSDLEPHMNYTFTVEARNGVSGLVTSRSFRTASVSINQTEPPKVRLEGRSTTSLSVSWSIPPPQQSRVWKYEVTYRKKVTPRGAGLALAGPTAGDRLVT

SEQ ID NO: 169 - DNA, 1353 bp, Homo Sapiens
agtcccgcgcggagtatcggcgtccacccgcccagggagagtcagacctgggggggcgagggccccccaaactcagttcggatcctacccgagtgaggcggcgccatggagctccgggtgctgctctgctgggcttcgttggccgcagctttggaagagaccctgctgaacacaaaattggaaactgctgatctgaagtgggtgacattccctcaggtggacgggcagtgggaggaactgagcggcctggatgaggaacagcacagcgtgcgcacctacgaagtgtgtgacgtgcagcgtgccccgggccaggcccactggcttcgcacaggttgggtcccacggcggggcgccgtccacgtgtacgccacgctgcgcttcaccatgctcgagtgcctgtccctgcctcgggctgggcgctcctgcaaggagaccttcaccgtcttctactatgagagcgatgcggacacggccacggccctcacgccagcctggatggagaacccctacatcaaggtggacacggtggccgcggagcatctcacccggaagcgccctggggccgaggccaccgggaaggtgaatgtcaagacgctgcgtctgggaccgctcagcaaggctggcttctacctggccttccaggaccagggtgcctgcatggccctgctatccctgcacctcttctacaaaaagtgcgcccagctgactgtgaacctgactcgattcccggagactgtgcctcgggagctggttgtgcccgtggccggtagctgcgtggtggatgccgtccccgcccctggccccagccccagcctctactgccgtgaggatggccagtgggccgaacagccggtcacgggctgcagctgtgctccggggttcgaggcagctgaggggaacaccaagtgccgagggcgccgagggtcccagcagcgtgcggttcctgaagacgtcagaaaaccgggcagagctgcgggggctgaagcggggagccagctacctggtgcaggtacgggcgcgctctgaggccggctacgggcccttcggccaggaacatcacagccagacccaactggatgagagcgagggctggcgggagcagctggccctgattgcgggcacggcagtcgtgggtgtggtcctggtcctggtggtcattgtggtcgcagttctctgcctcaggaagcagagcaatgggagagaagcagaatattcggacaaacacggacagtatctcatcggacatggtactaaggtctacatcgaccccttcacttatgaagaccctaatgaggctgtgagggaatttgcaaaagagatcgatgtctcctacgtcaagattgaagaggtgat

SEQ ID NO: 170 - protein, 306 aa, Homo Sapiens
MELRVLLCWASLAAALEETLLNTKLETADLKWVTFPQVDGQWEELSGLDEEQHSVRTYEVCDVQRAPGQAHWLRTGWVPRRGAVHVYATLRFTMLECLSLPRAGRSCKETFTVFYYESDADTATALTPAWMENPYIKVDTVAAEHLTRKRPGAEATGKVNVKTLRLGPLSKAGFYLAFQDQGACMALLSLHLFYKKCAQLTVNLTRFPETVPRELVVPVAGSCVVDAVPAPGPSPSLYCREDGQWAEQPVTGCSCAPGFEAAEGNTKCRGRRGSQQRAVPEDVRKPGRAAGAEAGSQLPGAGTGAL

SEQ ID NO: 171 - DNA, 1813 bp, Homo Sapiens
actcagttcggatcctacccgagtgaggcggcgccatggagctccgggtgctgctctgctgggcttcgttggccgcagctttggaagagaccctgctgaacacaaaattggaaactgctgatctgaagtgggtgacattccctcaggtggacgggcagtgggaggaactgagcggcctggatgaggaacagcacagcgtgcgcacctacgaagtgtgtgacgtgcagcgtgccccgggccaggcccactggcttcgcacaggttgggtcccacggcggggcgccgtccacgtgtacgccacgctgcgcttcaccatgctcgagtgcctgtccctgcctcgggctgggcgctcctgcaaggagaccttcaccgtcttctactatgagagcgatgcggacacggccacggccctcacgccagcctggatggagaacccctacatcaaggtggacacggtggccgcggagcatctcacccggaagcgccctggggccgaggccaccgggaaggtgaatgtcaagacgctgcgtctgggaccgctcagcaaggctggcttctacctggccttccaggaccagggtgcctgcatggccctgctatccctgcacctcttctacaaaaagtgcgcccagctgactgtgaacctgactcgattcccggagactgtgcctcgggagctggttgtgcccgtggccggtagctgcgtggtggatgccgtccccgcccctggccccagccccagcctctactgccgtgaggatggccagtgggccgaacagccggtcacgggctgcagctgtgctccggggttcgaggcagctgaggggaacaccaagtgccgagcctgtgcccagggcaccttcaagcccctgtcaggagaagggtcctgccagccatgcccagccaatagccactctaacaccattggatcagccgtctgccagtgccgcgtcgggtacttccgggcacgcacagacccccggggtgcaccctgcaccacccctccttcggctccgcggagcgtggtttcccgcctgaacggctcctccctgcacctggaatggagtgcccccctggagtctggtggccgagaggacctcacctacgccctccgctgccgggagtgccgacccggaggctcctgtgcgccctgcgggggagacctgacttttgaccccggcccccgggacctggtggagccctgggtggtggttcgagggctacgtcctgacttcacctatacctttgaggtcactgcattgaacggggtatcctccttagccacggggcccgtcccatttgagcctgtcaatgtcaccactgaccgagaggtacctcctgcagtgtctgacatccgggtgacgcggtcctcacccagcagcttgagcctggcctgggctgttccccgggcacccagtggggctgtgctggactacgaggtcaaataccatgagaagggcgccgagggtcccagcagcgtgcggttcctgaagacgtcagaaaaccgggcagagctgcgggggctgaagcggggagccagctacctggtgcagagagcgagggctggcgggagcagctggccctgattgcgggcacggcagtcgtgggtgtggtcctggtcctggtggtcattgtggtcgcagttctctgcctcaggaagcagagcaatgggagagaagcagaatattcggacaaacacggacagtatctcatcggacatggtactaaggtctacatcgaccccttcacttatgaagaccctaatgaggctgtgagggaatttgcaaaagagatcgatgtctcctacgtcaag

SEQ ID NO: 172 - protein, 516 aa, Homo Sapiens
MELRVLLCWASLAAALEETLLNTKLETADLKWVTFPQVDGQWEELSGLDEEQHSVRTYEVCDVQRAPGQAHWLRTGWVPRRGAVHVYATLRFTMLECLSLPRAGRSCKETFTVFYYESDADTATALTPAWMENPYIKVDTVAAEHLTRKRPGAEATGKVNVKTLRLGPLSKAGFYLAFQDQGACMALLSLHLFYKKCAQLTVNLTRFPETVPRELVVPVAGSCVVDAVPAPGPSPSLYCREDGQWAEQPVTGCSCAPGFEAAEGNTKCRACAQGTFKPLSGEGSCQPCPANSHSNTIGSAVCQCRVGYFRARTDPRGAPCTTPPSAPRSVVSRLNGSSLHLEWSAPLESGGREDLTYALRCRECRPGGSCAPCGGDLTFDPGPRDLVEPWVVVRGLRPDFTYTFEVTALNGVSSLATGPVPFEPVNVTTDREVPPAVSDIRVTRSSPSSLSLAWAVPRAPSGAVLDYEVKYHEKGAEGPSSVRFLKTSENRAELRGLKRGASYLVQRARAGGSSWP

SEQ ID NO: 173 - DNA, 1801 bp, Homo Sapiens
actcagttcggatcctacccgagtgaggcggcgccatggagctccgggtgctgctctgctgggcttcgttggccgcagctttggaagagaccctgctgaacacaaaattggaaactgctgatctgaagtgggtgacattccctcaggtggacgggcagtgggaggaactgagcggcctggatgaggaacagcacagcgtgcgcacctacgaagtgtgtgacgtgcagcgtgccccgggccaggcccactggcttcgcacaggttgggtcccacggcggggcgccgtccacgtgtacgccacgctgcgcttcaccatgctcgagtgcctgtccctgcctcgggctgggcgctcctgcaaggagaccttcaccgtcttctactatgagagcgatgcggacacggccacggccctcacgccagcctggatggagaacccctacatcaaggtggacacggtggccgcggagcatctcacccggaagcgccctggggccgaggccaccgggaaggtgaatgtcaagacgctgcgtctgggaccgctcagcaaggctggcttctacctggccttccaggaccagggtgcctgcatggccctgctatccctgcacctcttctacaaaaagtgcgcccagctgactgtgaacctgactcgattcccggagactgtgcctcgggagctggttgtgcccgtggccggtagctgcgtggtggatgccgtccccgcccctggccccagccccagcctctactgccgtgaggatggccagtgggccgaacagccggtcacgggctgcagctgtgctccggggttcgaggcagctgaggggaacaccaagtgccgagcctgtgcccagggcaccttcaagcccctgtcaggagaagggtcctgccagccatgcccagccaatagccactctaacaccattggatcagccgtctgccagtgccgcgtcgggtacttccgggcacgcacagacccccggggtgcaccctgcaccacccctccttcggctccgcggagcgtggtttcccgcctgaacggctcctccctgcacctggaatggagtgcccccctggagtctggtggccgagaggacctcacctacgccctccgctgccgggagtgccgacccggaggctcctgtgcgccctgcgggggagacctgacttttgaccccggcccccgggacctggtggagccctgggtggtggttcgagggctacgtcctgacttcacctatacctttgagtacctcctgcagtgtctgacatccgggtgacgcggtcctcacccagcagcttgagcctggcctgggctgttccccgggcacccagtggggctgtgctggactacgaggtcaaataccatgagaagggcgccgagggtcccagcagcgtgcggttcctgaagacgtcagaaaaccgggcagagctgcgggggctgaagcggggagccagctacctggtgcaggtacgggcgcgctctgaggccggctacgggcccttcggccaggaacatcacagccagacccaactggatgagagcgagggctggcgggagcagctggccctgattgcgggcacggcagtcgtgggtgtggtcctggtcctggtggtcattgtggtcgcagttctctgcctcaggaagcagagcaatgggagagaagcagaatattcggacaaacacggacagtatctcatcggacatggtactaaggtctacatcgaccccttcacttatgaagaccctaatgaggctgtgagggaatttgcaaaagagatcgatgtctcctacgtcaag

SEQ ID NO: 174 - protein, 414 aa, Homo Sapiens
MELRVLLCWASLAAALEETLLNTKLETADLKWVTFPQVDGQWEELSGLDEEQHSVRTYEVCDVQRAPGQAHWLRTGWVPRRGAVHVYATLRFTMLECLSLPRAGRSCKETFTVFYYESDADTATALTPAWMENPYIKVDTVAAEHLTRKRPGAEATGKVNVKTLRLGPLSKAGFYLAFQDQGACMALLSLHLFYKKCAQLTVNLTRFPETVPRELVVPVAGSCVVDAVPAPGPSPSLYCREDGQWAEQPVTGCSCAPGFEAAEGNTKCRACAQGTFKPLSGEGSCQPCPANSHSNTIGSAVCQCRVGYFRARTDPRGAPCTTPPSAPRSVVSRLNGSSLHLEWSAPLESGGREDLTYALRCRECRPGGSCAPCGGDLTFDPGPRDLVEPWVVVRGLRPDFTYTFEYLLQCLTSG

SEQ ID NO: 175 - DNA, 965 bp, Homo Sapiens
atgtggagctggaagtgcctcctcttctgggctgtgctggtcacagccacactctgcaccgctaggccgtccccgaccttgcctgaacaagatgctctcccctcctcggaggatgatgatgatgatgatgactcctcttcagaggagaaagaaacagataacaccaaaccaaaccgtatgcccgtagctccatattggacatccccagaaaagatggaaaagaaattgcatgcagtgccggctgccaagacagtgaagttcaaatgcccttccagtgggaccccaaaccccacactgcgctggttggaaaatggcaaagaattcaaacctggccacagaattggaggctacaaggtccgttatgccacctggagcatcataatggactctgtggtgccctctgacaagggcaactacacctgcattgtggagaatgagtacggcagcatcaaccacacataccagctggatgtcgtggagcggtcccctcaccggcccatcctgcaagcagggttgcccgccaacaaaacagtggccctgggtagcaacgtggagttcatgtgtaaggtgtacagtgacccgcagccgcacatccagtggctaaagcacatcgaggtgaatgggagcaagattggcccggacaacctgccttatgtccagatcttgaagactgctggagttaataccaccgacaaagagatggaggtgcttcacttaagaaatgtctcctttgaggacgcaggggagtatacgtgcttggcgggtaactctatcggactctcccatcactctgcatggttgaccgttctggaaggtacacactgtaacttctcctctcgatgtcctgccctcgccacgggcacggggggagcatgcatttccaggcttggggagacacagaggcaggagagctggaagaatgggctcctgcctgcctggtgccacatcctgccccagctttgagg

SEQ ID NO: 176 - protein, 320 aa, Homo Sapiens [sequence omitted]

SEQ ID NO: 177 - DNA, 801 bp, Homo Sapiens
atggtcagctggggtcgtttcatctgcctggtcgtggtcaccatggcaaccttgtccctggcccggccctccttcagtttagttgaggataccacattagagccagaagagccaccaaccaaataccaaatctctcaaccagaagtgtacgtggctgcgccaggggagtcgctagaggtgcgctgcctgttgaaagatgccgccgtgatcagttggactaaggatggggtgcacttggggcccaacaataggacagtgcttattggggagtacttgcagataaagggcgccacgcctagagactccggcctctatgcttgtactgccagtaggactgtagacagtgaaacttggtacttcatggtgaatgtcacagatgccatctcatccggagatgatgaggatgacaccgatggtgcggaagattttgtcagtgagaacagtaacaacaagagagcaccatactggaccaacacagaaaagatggaaaagcggctccatgctgtgcctgcggccaacactgtcaagtttcgctgcccagccggggggaacccaatgccaaccatgcggtggctgaaaaacgggaaggagtttaagcaggagcatcgcattggaggctacaaggtacgaaaccagcactggagcctcattatggaaagtgtggtcccatctgacaagggaaattatacctgtgtggtggagaatgaatacgggtccatcaatcacacgtaccacctggatgttgtgggtgagtctgcctctcctcgtgtggcggctgcataccagcccattcttgcttga

SEQ ID NO: 178 - protein, 266 aa, Homo Sapiens [sequence omitted]

SEQ ID NO: 179 - DNA, 953 bp, Homo Sapiens
atggtcagctggggtcgtttcatctgcctggtcgtggtcaccatggcaaccttgtccctggcccggccctccttcagtttagttgaggataccacattagagccagaagagccaccaaccaaataccaaatctctcaaccagaagtgtacgtggctgcgccaggggagtcgctagaggtgcgctgcctgttgaaagatgccgccgtgatcagttggactaaggatggggtgcacttggggcccaacaataggacagtgcttattggggagtacttgcagataaagggcgccacgcctagagactccggcctctatgcttgtactgccagtaggactgtagacagtgaaacttggtacttcatggtgaatgtcacagatgccatctcatccggagatgatgaggatgacaccgatggtgcggaagattttgtcagtgagaacagtaacaacaagagagcaccatactggaccaacacagaaaagatggaaaagcggctccatgctgtgcctgcggccaacactgtcaagtttcgctgcccagccggggggaacccaatgccaaccatgcggtggctgaaaaacgggaaggagtttaagcaggagcatcgcattggaggctacaaggtacgaaaccagcactggagcctcattatggaaagtgtggtcccatctgacaagggaaattatacctgtgtggtggagaatgaatacgggtccatcaatcacacgtaccacctggatgttgtggagcgatcgcctcaccggcccatcctccaagccggactgccggcaaatgcctccacagtggtcggaggagacgtagagtttgtctgcaaggtttacagtgatgcccagccccacatccagtggatcaagcacgtggaaaagaacggcagtaaatacgggcccgacgggctgccctacctcaaggttctcaaggtgaggactttctg

SEQ ID NO: 180 - protein, 317 aa, Homo Sapiens
MVSWGRFICLVVVTMATLSLARPSFSLVEDTTLEPEEPPTKYQISQPEVYVAAPGESLEVRCLLKDAAVISWTKDGVHLGPNNRTVLIGEYLQIKGATPRDSGLYACTASRTVDSETWYFMVNVTDAISSGDDEDDTDGAEDFVSENSNNKRAPYWTNTEKMEKRLHAVPAANTVKFRCPAGGNPMPTMRWLKNGKEFKQEHRIGGYKVRNQHWSLIMESVVPSDKGNYTCVVENEYGSINHTYHLDVVERSPHRPILQAGLPANASTVVGGDVEFVCKVYSDAQPHIQWIKHVEKNGSKYGPDGLPYLKVLKVRTF

SEQ ID NO: 181 - DNA, 844 bp, Homo Sapiens
atggtcagctggggtcgtttcatctgcctggtcgtggtcaccatggcaaccttgtccctggcccggccctccttcagtttagttgaggatatcacattagagccagaaggagcaccatactggaccaacacagaaaagatggaaaagcggctccatgctgtgcctgcggccaacactgtcaagtttcgctgcccagccggggggaacccaatgccaaccatgcggtggctgaaaaacgggaaggagtttaagcaggagcatcgcattggaggctacaaggtacgaaaccagcactggagcctcattatggaaagtgtggtcccatctgacaagggaaattatacctgtgtggtggagaatgaatacgggtccatcaatcacacgtaccacctggatgttgtggagcgatcgcctcaccggcccatcctccaagccggactgccggcaaatgcctccacagtggtcggaggagacgtagagtttgtctgcaaggtttacagtgatgcccagccccacatccagtggatcaagcacgtggaaaagaacggcagtaaatacgggcccgacgggctgccctacctcaaggttctcaaggccgccggtgttaacaccacggacaaagagattgaggttctctatattcggaatgtaacttttgaggacgctggggaatatacgtgcttggcgggtaattctattgggatatcctttcactccgcatggttgacagttctgccaggtatatactgttctttctctctgggtttttttcctttttcttggttgactgctataaaattaacacagcttctgttatcagaaatggccccttttatccttgcat

SEQ ID NO: 182 - protein, 281 aa, Homo Sapiens [sequence omitted]

SEQ ID NO: 183 - DNA, 1191 bp, Homo Sapiens
atggtcagctggggtcgtttcatctgcctggtcgtggtcaccatggcaaccttgtccctggcccggccctccttcagtttagttgaggataccacattagagccagaagagccaccaaccaaataccaaatctctcaaccagaagtgtacgtggctgcgccaggggagtcgctagaggtgcgctgcctgttgaaagatgccgccgtgatcagttggactaaggatggggtgcacttggggcccaacaataggacagtgcttattggggagtacttgcagataaagggcgccacgcctagagactccggcctctatgcttgtactgccagtaggactgtagacagtgaaacttggtacttcatggtgaatgtcacagatgccatctcatccggagatgatgaggatgacaccgatggtgcggaagattttgtcagtgagaacagtaacaacaagagagcaccatactggaccaacacagaaaagacggaaaagcggctccatgctgtgcctgcggccaacactgtcaagtttcgctgcccagccggggggaacccaatgccaaccatgcggtggctgaaaaacgggaaggagtttaagcaggagcatcgcattggaggctacaaggtacgaaaccagcactggagcctcattatggaaagtgtggtcccatctgacaagggaaattatacctgtgtggtggagaatgaatacgggtccatcaatcacacgtaccacctggatgttgtggagcgatcgcctcaccggcccatcctccaagccggactgccggcaaatgcctccacagtggtcggaggagacgtagagtttgtctgcaaggtttacagtgatgcccagccccacatccagtggatcaagcacgtggaaaagaacggcagtaaatacgggcccgacgggctgccctacctcaaggttctcaaggccgccggtgttaacaccacggacaaagagattgaggttctctatattcggaatgtaacttttgaggacgctggggaatatacgtgcttggcgggtaattctattgggatatcctttcactctgcatggttgacagttctgccaggtatatactgttctttctctctgggtttttttcccttttcttggttgactgctataaaattaacacagcttctgttatcagaaatggccccttttatccttgcataa

SEQ ID NO: 184 - protein, 396 aa, Homo Sapiens [sequence omitted]

SEQ ID NO: 185 - DNA, 1240 bp, Homo Sapiens
atgaaggcccccgctgtgcttgcacctggcatcctcgtgctcctgtttaccttggtgcagaggagcaatggggagtgtaaagaggcactagcaaagtccgagatgaatgtgaatatgaagtatcagcttcccaacttcaccgcggaaacacccatccagaatgtcattctacatgagcatcacattttccttggtgccactaactacatttatgttttaaatgaggaagaccttcagaaggttgctgagtacaagactgggcctgtgctggaacacccagattgtttcccatgtcaggactgcagcagcaaagccaatttatcaggaggtgtttggaaagataacatcaacatggctctagttgtcgacacctactatgatgatcaactcattagctgtggcagcgtcaacagagggacctgccagcgacatgtctttccccacaatcatactgctgatatacagtcggaggttcactgcatattctccccacagatagaagagcccagccagtgtcctgactgtgtggtgagcgccctgggagccaaagtcctttcatctgtaaaggaccggttcatcaacttctttgtaggcaataccataaattcttcttatttcccagatcatccattgcattcgatatcagtgagaaggctaaaggaaacgaaagatggttttatgtttttgacggaccagtcctacattgatgttttacctgagttcagagattcttaccccattaagtatgtccatgcctttgaaagcaacaattttatttacttcttgacggtccaaagggaaactctagatgctcagacttttcacacaagaataatcaggttctgttccataaactctggattgcattcctacatggaaatgcctctggagtgtattctcacagaaaagagaaaaaagagatccacaaagaaggaagtgttaaatatacttcaggctgcgtatgtcagcaagcctggggcccagcttgctaggcaaataggagccagcctgaatgatgacattcttttcggggtgttcgcacaaagcaagccagattctgccgaaccaatggatcgatctgccatgtgtgcattccctatcaaatatgtcaacgacttcttcaacaagatcgtcaacaaaaacaatgtgagatgtctccagcatttttacggacccaatcatgagcactgctttaatagggtaagtcacatcagttccccacttataaactgtgaggtat

SEQ ID NO: 186 - protein, 413 aa, Homo Sapiens [sequence omitted]

SEQ ID NO: 187 - DNA, 1405 bp, Homo Sapiens
atgaaggcccccgctgtgcttgcacctggcatcctcgtgctcctgtttaccttggtgcagaggagcaatggggagtgtaaagaggcactagcaaagtccgagatgaatgtgaatatgaagtatcagcttcccaacttcaccgcggaaacacccatccagaatgtcattctacatgagcatcacattttccttggtgccactaactacatttatgttttaaatgaggaagaccttcagaaggttgctgagtacaagactgggcctgtgctggaacacccagattgtttcccatgtcaggactgcagcagcaaagccaatttatcaggaggtgtttggaaaaataacatcaacatggctctagttgtcgacacctactatgatgatcaactcattagctgtggcagcgtcaacagagggacctgccagcgacatgtctttccccacaatcatactgctgacatacagtcggaggttcactgcatattctccccacagatagaagagcccagccagtgtcctgactgtgtggtgagcgccctgggagccaaagtcctttcatctgtaaaggaccggttcatcaacttctttgtaggcaataccataaattcttcttatttcccagatcatccattgcattcgatatcagtgagaaggctaaaggaaacgaaagatggttttatgtttttgacggaccagtcctacattgatgttttacctgagttcagagattcttaccccattaagtatgtccatgcctttgaaagcaacaattttatttacttcttgacggtccaaagggaaactctagatgctcagacttttcacacaagaataatcaggttctgttccataaactctggattgcattcctacatggaaatgcctctggagtgtattctcacagaaaagagaaaaaagagatccacaaagaaggaagtgtttaatatacttcaggctgcgtatgtcagcaagcctggggcccagcttgctagacaaataggagccagcctgaatgatgacattcttttcggggtgttcgcacaaagcaagccagattctgccgaaccaatggatcgatctgccatgtgtgcattccctatcaaatatgtcaacgacttcttcaacaagatcgtcaacaaaaacaatgtgagatgtctccagcatttttacggacccaatcatgagcactgctttaataggacacttctgagaaattcatcaggctgtgaagcgcgccgtgatgaatatcgaacagagtttaccacagctttgcagcgcgttgacttattcatgggtcaattcagcgaagtcctcttaacatctatatccaccttcattaaaggagacctcaccatagctaatcttgggacatcagagggtcgcttcatgcaggtaagtgctttct

SEQ ID NO: 188 - protein, 468 aa, Homo Sapiens [sequence omitted]

SEQ ID NO: 189 - DNA, 1557 bp, Homo Sapiens
atgaaggcccccgctgtgcttgcacctggcatcctcgtgctcctgtttaccttggtgcagaggagcaatggggagtgtaaagaggcactagcaaagtccgagatgaatgtgaatatgaagtatcagcttcccaacttcaccgcggaaacacccatccagaatgtcattctacatgagcatcacattttccttggtgccactaactacatttatgttttaaatgaggaagaccttcagaaggttgctgagtacaagactgggcctgtgctggaacacccagattgtttcccatgtcaggactgcagcagcaaagccaatttatcaggaggtgtttggaaagataacattaacatggctctagttgtcgacacctactatgatgatcaactcattagctgtggcagcgtcaacagagggacctgccagcgacatgtctttccccacaatcatactgctgacatacagtcggaggttcactgcatattctccccacagatagaagagcccagccagtgtcctgactgtgtggtgagcgccctgggagccaaagtcctttcatctgtaaaggaccggttcatcaacttctttgtaggcaataccataaattcttcttatttcccagatcatccattgcattcgatatcagtgagaaggctaaaggaaacgaaagatggttttatgtttttgacggaccagtcctacattgatgttttacctgagttcagagattcttaccccattaagtatgtccatgcctttgaaagcaacaattttatttacttcttgacggtccaaagggaaactctagatgctcagacttttcacacaagaataatcaggttctgttccataaactctggattgcattcctacatggaaatgcctctggagtgtattctcacagaaaagagaaaaaagagatccacaaagaaggaagtgtttaatatacttcaggctgcgtatgtcagcaagcctggggcccagcttgctagacaaataggagccagcctgaatgatgtcattcttttcggggtgttcgcacaaagcaagccagattctgccgaaccaatggatcgatctgccatgtgtgcattccctatcaaatatgtcaacgacttcttcaacaagatcgtcaacaaaaacaatgtgagatgtctccagcatttttacggacccaatcatgagcactgctttaataggacacttctgagaaattcatcaggctgtgaagcgcgccgtgatgaatatcgaacagagtttaccacagctttgcagcgcgttgacttattcatgggtcaattcagcgaagtcctcttaacatctatatccaccttcattaaaggagacctcaccatagctaatcttgggacatcagagggtcgcttcatgcaggttgtggtttctcgatcaggaccatcaacccctcatgtgaattttctcctggactcccatccagtgtctccagaagtgattgtggagcatacattaaaccaaaatgactacacactggttatcactgggaaggaggtaagctgttcccacagggaatttccatga

SEQ ID NO: 190 - protein, 518 aa, Homo Sapiens [sequence omitted]

SEQ ID NO: 191 - DNA, 1789 bp, Homo Sapiens
atgaaggcccccgctgtgcttgcacctggcatcctcgtgctcctgtttaccttggtgcagaggagcaatggggagtgtaaagaggcactagcaaagtccgagatgaatgtgaatatgaagtatcagcttcccaacttcaccgcggaaacacccatccagaatgtcattctacatgagcatcacattttccttggtgccactaactacatttatgttttaaatgaggaagaccttcagaaggttgctgagtacaagactgggcctgtgctggaacacccagattgtttcccatgtcaggactgcagcagcaaagccaatttatcaggaggtgtttggaaagataacatcaacatggctctagttgtcgacacctactatgatgatcaactcattagctgtggcagcgtcaacagagggacctgccagcgacatgtctttccccacaatcatactgctgacatacagtcggaggttcactgcatattctccccacagatagaagagcccagccagtgtcctgactgtgtggtgagcgccctgggagccaaagtcctttcatctgtaaaggaccggttcatcaacttctttgtaggcaataccataaattcttcttatttcccagatcatccattgcattcgatatcagtgagaaggctaaaggaaacgaaagatggttttatgtttttgacggaccagtcctacattgatgttttacctgagttcagagattcttaccccattaagtatgtccatgcctttgaaagcaacaattttatttacttcttgacggtccaaagggaaactctagatgctcagacttttcacacaagaataatcaggttctgttccataaactctggattgcattcctacatggaaatgcctctggagtgtattctcacagaaaagagaaaaaagagatccacaaagaaggaagtgtttaatatacttcaggctgcgtatgtcagcaagcctggggcccagcttgctagacaaataggagccagcccgaatgatgacattcttttcggggtgttcgcacaaagcaagccagattctgccgaaccaatggatcgatctgccatgtgtgcattccctatcaaatatgtcaacgacttcttcaacaagatcgtcaacaaaaacaatgtgagatgtctccagcatttttacggacccaatcatgagcactgctttaataggacacttctgagaaattcatcaggctgtgaagcgcgccgtgatgaatatcgaacagagtttaccacagctttgcagcgcgttgacttattcatgggtcaattcagcgaagtcctcttaacatctatatccaccttcattaaaggagacctcaccatagctaatcttgggacatcagagggtcgcttcatgcaggttgtggtttctcgatcaggaccatcaacccctcatgtgaattttctcctggactcccatccagtgtctccagaagtgattgtggagcatacattaaaccaaaatggctacacactggttatcactgggaagaagatcacgaagatcccattgaatggcttgggctgcagacatttccagtcctgcagtcaatgcctctctgccccaccctttgttcagtgtggctggtgccacgacaaatgtgtgcgatcggaggaatgcctgagcgggacatggactcaacagatctgtctgcctgcaatctacaaggtaggaatctctaacagctggcatacatgtttttgtttggtgttttttttttttttttggtttggtttggtttgttttttgttttttt

SEQ ID NO: 192 - protein, 596 aa, Homo Sapiens [sequence omitted]

SEQ ID NO: 193 - DNA, 1936 bp, Homo Sapiens
atgaaggcccccgctgtgcttgcacctggcatcctcgtgctcctgtttaccttggtgcagaggagcaatggggagtgtaaagaggcactagcaaagtccgagatgaatgtgaatatgaagtatcggcttcccaacttcaccgcggaaacacccatccagaatgtcattctacatgagcatcacattttccttggtgccactaactacatttatgttttaaatgaggaagaccttcagaaggttgctgagtacaagactgggcctgtgctggaacacccagattgtttcccatgtcaggactgcagcagcaaagccaatttatcaggaggtgtttggagagataacatcaacatggctctagttgtcgacacctactatgatgatcaactcattagctgtggcagcgtcaacagagggacctgccagcgacatgcctttccccacaatcatactgctgacatacagtcggaggttcactgcatattctccccacagatagaagatcccagccagtgtcctgactgtgtggtgagcgccctgggagccaaagtcctttcatctgtaaaggaccggttcatcaacttctttgtaggcaataccataaattcttcttatttcccagatcatccattgcattcgatatcattgagaaggctaaaggaaacgaaagatggttttatgtttttgacggaccagtcctacattgatgttttacctgagttcagagattcttaccccattaagtatgtccatgcctttgaaagcaacaattttatttacttcttgacggtccaaagggaaactctagatgctcagacttttcacgcaagaataatcaggttctgttccataaactctggattgcattcctacatggaaatgcctctggagtgtattctcacagagaagagaaaaaagagatccacaaagaaggaagtgtttaatatacttcaggctgcgtatgtcagcaagcctggggcccagcttgctagacaaataggagccagcctgaatgatgacattcttttcggggtgttcgcacaaagcaagccagattctgccgaaccaatggatcgatctgccatgtgtgcattccctatcaaatatgtcaacgacttcttcaacaagatcgtcaacaaaaacaatgtgagatgtctccagcatttttacggacccaatcatgagcactgctttaatagggcagaaaatgtgctagattggaggtgaagaccctggagccagagagcctaggcttagtcctagccctgcactgaagacacttctgagaaattcatcaggctgtgaagcgcgccgtgatgaatatcgaacagagtttaccacagctttgcagcgcgttgacttattcatgggtcaattcagcgaagtcctcttaacatctatatccaccttcattaaaggagacctcaccatagctaatcttgggacatcagagggtcgcttcatgcaggttgtggtttctcgatcaggaccatcaacccctcatgtgaattttctcctggactcccatccagtgtctccagaagtgattgtggagcatacattaaaccaaaatggctacacactggttatcactgggaagaagatcacgaagatcccattgaatggcttgggctgcagacatttccagtcctgcagtcaatgcctctctgccccaccctttgttcagtgtggctggtgccacaacaaatgtgtgcgatcggaggaatgcctgagcgggacatggactcaacagatctgtctgcctgcaatctacaaggtaggaatctctaacagctggcatacatgtttttgtttggtgttttttttttttttttggtttggtttggtttgttttttgtttttttagatacaaatcccactaatgaaaaaaatttaaaaatcaatttactcatttagctgtgagtcatcagctaaa

SEQ ID NO: 194 - protein, 408 aa, Homo Sapiens [sequence omitted]

SEQ ID NO: 195 - DNA, 1888 bp, Homo Sapiens
atgaaggcccccgctgtgcttgcacctggcatcctcgtgctcctgtttaccttggtgcagaggagcaatggggagtgtaaagaggcactagcaaagtccgagatgaatgtgaatatgaagtatcagcttcccaacttcaccgcggaaacacccatccagaatgtcattctacatgagcatcacattttccttggtgccactaactacatttatgttttaaatgaggaagaccttcagaaggttgctgagtacaagactgggcctgtgctggaacacccagattgtttcccatgtcaggactgcagcagcaaagccaatttatcaggaggtgtttggaaagataacatcaacatggctctagttgtcgacacctactatgatgatcaactcattagctgtggcagcgtcaacagagggacctgccagcgacatgtctttccccacaatcatactgctgacatacagtcggaggctcactgcatattctccccacagatagaagagcccagtcagtgtcctgactgtgtggtgagcgccctgggagccaaagtcctttcatctgtaaaggaccggttcatcaacttctttgtaggcaataccataaattcttcttatttcccagatcatccattgcattcgatatcagtgagaaggctaaaggaaacgaaagatggttttatgtttttgacggaccagtcctacattgatgttttacctgagttcagagattcttaccccattaagtatgtccatgcctttgaaagcaacaattttatttacttcttgacggtccaaagggaaactctagatgctcagacttttcacacaagaataatcaggttctgttccataaactctggattgcattcctacatggaaatgcctctggagtgtattctcacagaaaagagaaaaaagagatccacaaagaaggaagtgtttaatatacttcaggctgcgtatgtcagcaagcctggggcccagcttgctagacaaataggagccagcctgaatgatgacattcttttcggggtgttcgcacaaagcaagccagattctgccgaaccaatggatcgatctgccatgtgtgcattccctatcaaatatgtcaacgacttcttcaacaagatcgtcaacaaaaacaatgtgagatgtctccagcatttttacggacccaatcatgagcactgctttaataggacacttctgagaaattcatcaggctgtgaagcgcgccgtgatgaatatcgaacagagtttaccacagctttgcagcgcgttgacttattcatgggtcaattcagcgaagtcctcttaacatctatatccaccttcattaaaggagacctcaccatagctaatcttgggacatcagagggtcgcttcatgcaggttgtggtttctcgatcaggaccatcaacccctcatgtgaattttctcctggactcccatccagtgtctccagaagtgattgtggagcatacattaaaccaaaatggctacacactggttatcactgggaagaagatcacgaagatcccattgaatggcttgggctgcagacatttccagtcctgcagtcaatgcctctctgccccaccctttgttcagtgtggctggtgccacgacaaatgtgtgcgatcggaggaatgcctgagcgggacatggactcaacagatctgtctgcctgcaatctacaaggttttcccaaatagtgcaccccttgaaggagggacaaggctgaccatatgtggctgggactttggatttcggaggaataataaatttgatttaaagaaaactagagttctccttggaaatgagagctgcaccttgactttaagtgagagcacgatgaatacgtaaggatcttaaaatgctttgctgg

SEQ ID NO: 196 - protein, 621 aa, Homo Sapiens [sequence omitted]

SEQ ID NO: 197 - DNA, 1995 bp, Homo Sapiens
atgaaggcccccgctgtgcttgcacctggcatcctcgtgctcctgtttaccttggtgcagaggagcaatggggagtgtaaagaggcactagcaaagtccgagatgaatgtgaatatgaagtatcagcttcccaacttcaccgcggaaacacccatccagaatgtcattctacatgagcatcacattttccttggtgccactaactacatttatgttttaaatgaggaagaccttcagaaggttgctgagtacaagactgggcctgtgctggaacacccagattgtttcccatgtcaggactgcagcagcaaagccaatttatcaggaggtgtttggaaagataacatcaacatggctctagttgtcgacacctactatgatgatcaactcattagctgtggcagcgtcaacagagggacctgccagcgacatgtctttccccacaatcatactgctgacatacagtcggaggttcactgcatattctccccacagatagaagagcccagccagtgtcctgactgtgtggtgagcgccctgggagccaaagtcctttcatctgtaaaggaccggttcatcaacttctttgtaggcaataccataaattcttcttatttcccagatcatccattgcattcgatatcagtgagaaggctaaaggaaacgaaagatggttttatgtttttgacggaccagtcctacattgatgttttacctgagttcagagattcttaccccattaagtatgtccatgcctttgaaagcaacaattttatttacttcttgacggtccaaagggaaactctagatgctcagacttttcacacaagaataatcaggttctgttccataaactctggattgcattcctacatggaaatgcctctggagtgtattctcacagaaaagagaaaaaagagatccacaaagaaggaagtgtttaatatacttcaggctgcgtatgtcagcaagcctggggcccagcttgctagacaaataggagccagcctgaatgatgacattcttttcggggtgttcgcacaaagcaagccagattctgccgaaccaatggatcgatctgccatgtgtgcattccctatcaaatatgtcaacgacttcttcaacaagatcgtcaacaaaaacaatgtgagatgtctccagcatttttacggacccaatcatgagcactgctttaataggacacttctgagaaattcatcaggctgtgaagcgcgccgtgatgaatatcgaacagagtttaccacagctttgcagcgcgttgacttattcatgggtcaattcagcgaagtcctcttaacatctatatccaccttcattaaaggagacctcaccatagctaatcttgggacatcagagggtcgcttcatgcaggttgtggtttctcgatcaggaccatcaacccctcatgtgaattttctcatggactcccatccagtgtctccagaagtgattgtggagcatacattaaaccaaaatggctacacactggttatcactgggaagaagatcacgaagatcccattgaatggcttgggctgcagacatttccagtcctgcagtcaatgcctctctgccccaccctttgttcagtgtggctggtgccacgacaaatgtgtgcgatcggaggaatgcctgagcgggacatggactcaacagatctgtctgcctgcaatctacaaggttttcccaaatagtgcaccccttgaaggagggacaaggctgaccatatgtggctgggactttggatttcggaggaataataaatttgatttaaagaaaactagagttctccttggaaatgagagctgcaccttgactttaagtgagagcacgatgaatacattgaaatgcacagttggtcctgccatgaataagcatttcaatatgtccataattatttcaaatggccacgggacaacacaatacagtacattctcctatgtggtaaggaagattctatcctatcatgtttga

SEQ ID NO: 198 - protein, 664 aa, Homo Sapiens [sequence omitted]

SEQ ID NO: 199 - DNA, 2170 bp, Homo Sapiens
atgaaggcccccgctgtgcttgcacctggcatcctcgtgctcctgtttaccctggtgcagaggagcaatggggagtgtaaagaggcactagcaaagtccgagatgaatgtgaatatgaagtatcagcttcccaacttcaccgcggaaacacccatccagaatgtcattctacatgagcatcacattttccttggtgccactaactacatttatgttttaaatgaggaagaccttcagaaggttgctgagtacaagactgggcctgtgctggaacacccagattgtttcccatgtcaggactgcagcagcaaagccaatttatcaggaggtgtttggaaagataacatcaacatggctctagttgtcgacacctactatgatgatcaactcattagctgtggcagcgtcaacagagggacctgccagcgacatgtctttccccacaatcatcctgctgacatacagtcggaggttcactgcatattctccccacagatagaagagcccagccagtgtcctgactgtgtggtgagcgccctgggagccaaagtcctttcatctgtaaaggaccggttcatcaacttctttgtaggcaataccataaattcttcttatttcccagatcatccattgcattcgatatcagtgagaaggctaaaggaaacgaaagatggttttatgtttttgacggaccagtcctacattgatgttttacctgagttcagagattcttaccccattaagtatgtccatgcctttgaaagcaacaattttatttacttcttgacggtccaaagggaaactctagatgctcagacttttcacacaagaataatcaggttctgttccataaactctggattgcattcctacatggaaatgcctctggagtgtattctcacagaaaagagaaaaaagagatccacaaagaaggaagtgtttaatatacttcaggctgcgtatgttagcaagcctggggcccagcttgctagacaaataggagccagcctgaatgatgacattcttttcggggtgttcgcacaaagcaagccagattctgccgaaccaatggatcgatctgccatgtgtgcattccctatcaaatatgtcaacgacttcttcaacaagatcgtcaacaaaaacaatgtgagatgtctccagcatttttacggacccaatcatgagcactgctttaataggacacttctgagaaattcatcaggctgtgaagcgcgccgtgatgaatatcgaacagagtttaccacagctttgcagcgcgttgacttattcatgggtcaattcagcgaagtcctcttaacatctatatccaccttcattaaaggagacctcaccatagctaatcttgggacatcagagggtcgcttcatgcaggttgtggtttctcgatcaggaccatcaacccctcatgtgaattttctcctggactcccatccagtgtctccagaagtgattgtggagcatacattaaaccaaaatggccacacactggttatcactgggaagaagatcacgaagatcccattgaatggcttgggctgcagacatttccagtcctgcagtcaatgcctctctgccccaccctttgttcagtgtggctggtgccacgacaaatgtgtgcgatcggaggaatgcctgagcgggacatggactcaacagatctgtctgcctgcaatctacaaggttttcccaaatagtgcaccccttgaaggagggacaaggctgaccatatgtggctgggactttggatttcggaggaataataaatttgatttaaagaaaactagagttctccttggaaatgagagctgcaccttgactttaagtgagagcacgatgaatacattgaaatgcacagttggtcctgccatgaataagcatttcaatatgtccataattatttcaaatggccacgggacaacacaatacagtacattctcctatgtggatcctgtaataacaagtatttcgccgaaatacggtcctatggctggtggcactttacttactttaactggaaattacctaaacagtgggaattctagacacatttcaattggtggaaaaacatgtactttaaaaaggtgttgtaaatttattttttgttgcatctgtcaatttgaattaatatctgtaccttaaaaattaagca

SEQ ID NO: 200 - protein, 719 aa, Homo Sapiens [sequence omitted]

SEQ ID NO: 201 - DNA, 2194 bp, Homo Sapiens
atgaaggcccccgctgtgcttgcacctggcatcctcgtgctcctgtttaccttggtgcagaggagcaatggggagtgtaaagaggcactagcaaagtccgagatgaatgcgaatatgaagtatcagcttcccaacttcaccgcggaaacacccatccagaatgtcattctacatgagcatcacattttccttggtgccactaactacatttatgttttaaatgaggaagaccttcagaaggttgctgagtacaagactgggcctgtgctggaacacccagattgtttcccatgtcaggactgcagcagcaaagccaatttatcaggaggtgtttggaaagataacatcaacatggctctagttgtcgacacctactatgatgatcaactcattagctgtggcagcgtcaacagagggacctgccagcgacatgtctttccccacaatcatactgctgacatacagtcggaggttcactgcatattctccccacagatagaagagcccagccagtgtcctgactgtgtggtgagcgccctgggagccaaagtcctttcatctgtaaaggaccggttcatcaacttctttgtaggcaataccataaattcttcttatttcccagatcatccattgcattcgatatcagtgaggaggctaaaggaaacgaaagatggttttatgtttttgacggaccagtcctacattgatgttttacctgagttcagagattcttaccccattaagtatgtccatgcctttgaaagcaacaattttatttacttcttgacggtccaaagggaaactctagatgctcagacttttcacacaagaataatcaggttctgttccataaactctggattgcattcctacatggaaatgcctctggagtgtattctcacagaaaagagaaaaaagagatccacaaagaaggaagtgtttaatatacttcaggctgcgtatgtcagcaagcctggggcccagcttgctagacaaataggagccagcctgaatgatgacattcttttcggggtgttcgcacaaagcaagccagattctgccgaaccaatggatcgatctgccatgtgtgcattccctatcaaatatgtcaacgacttcttcaacaagatcgtcaacaaaaacaatgtgagatgtctccagcatttttacggacccaatcatgagcactgctttaataggacacttctgagaaattcatcaggctgtgaagcgcgccgtgatgaatatcgaacagagtttaccacagctttgcagcgcgttgacttattcatgggtcaattcagcgaagtcctcttaacatctatatccaccttcattaaaggagacctcaccatagctaatcttgggacatcagagggtcgcttcatgcaggttgtggtttctcgatcaggaccatcaacccctcatgtgaattttctcctggactcccatccagtgtctccagaagtgattgtggagcatacattaaaccaaaatggctacacactggttatcactgggaagaagatcacgaagaccccattgaatggcttgggctgcagacatttccagtcctgcagtcaatgcctctctgccccaccctttgttcagtgtggctggtgccacgacaaatgtgtgcgatcggaggaatgcctgagcgggacatggactcaacagatctgtctgcctgcaatctacaaggttttcccaaatagtgcaccccttgaaggagggacaaggctgaccatatgtggctgggactttggatttcggaggaataataaatttgatttaaagaaaactagagttctccttggaaatgagagctgcaccttgactttaagtgagagcacgatgaatacattgaaatgcacagttggtcctgccatgaataagcatttcaatatgtccataattatttcaaatggccacgggacaacacagtacagtacattctcctatgtgttactttgttttgtttttatctcccctccaggatcctgtaataacaagtatttcgccgaaatacggtcctatggctggtggcactttacttactttaactggaaattacctaaacagtgggaattctagacacatttcaattggtggaaaaacatgtactttaaaaaggtgttgtaaatttattttttgttgcatctgtcaatttgaattaatatctgtaccttaaaaa

SEQ ID NO: 202 - protein, 697 aa, Homo Sapiens [sequence omitted]

SEQ ID NO: 203 - DNA, 2082 bp, Homo Sapiens
aatgaaggcccccgctgtgcttgcacctggcatcctcgtgctcctgtttaccttggtgcagaggagcaatggggagtgtaaagaggcactagcaaagtccgagatgaatgtgaatatgaagtatcagcttcccaacttcaccgcggaaacacccatccagaatgtcattctacatgagcatcacattttccttggtgccactaactacatttatgttttaaatgaggaagaccttcagaaggttgctgagtacaagactgggcctgtgctggaacacccagattgtttcccatgtcaggactgcagcagcaaagccaatttatcaggaggtgtttggaaagataacatcaacatggctctagttgtcgacacctactatgatgatcaactcattagctgtggcagcgtcaacagagggacctgccagcgacatgtctttccccacaatcatactgctgacatacagtcggaggttcactgcatattctccccacagatagaagagcccagccagtgtcctgactgtgtggtgagcgccctgggagccaaagtcctttcatctgtaaaggaccggttcatcaacttctttgtaggcaataccataaattcttcttatttcccagatcatccattgcattcgatatcagtgagaaggctaaaggaaacgaaagatggttttatgtttttgacggaccagtcctacattgatgttttacctgagttcagagattcttaccccattaagtatgtccatgcctttgaaagcaacaattttatttacttcttgacggtccaaagggaaactctagatgctcagacttttcacacaagaataatcaggttctgttccataaactctggattgcattcctacatggaaatgcctctggagtgtattctcacagaaaagagaaaaaagagatccacaaagaaggaagtgtttaatatacttcaggctgcgtatgtcagcaagcctggggcccagcttgctagacaaataggagccagcctgaatgatgacattcttttcggggtgttcgcacaaagcaagccagattctgccgaaccaatggatcgatctgccatgtgtgcattccctatcaaatatgtcaacgacttcttcaacaagatcgtcaacaaaaacaatgtgagatgtctccagcatttttacggacccaatcatgagcactgctttaataggacacttctgagaaattcatcaggctgtgaagcgcgccgtgatgaatatcgaacagagtttaccacagctttgcagcgcgttgacttattcatgggtcaattcagcgaagtcctcttaacatctatatccaccttcattaaaggagacctcaccatagctaatcttgggacatcagagggtcgcttcatgcaggttgtggtttctcgatcaggaccatcaacccctcatgtgaattttctcctggactcccatccagtgtctccagaagtgattgtggagcatacattaaaccaaaatggctacacactggttatcactgggaagaagtgtggctggcgccacgacaaatgtgtgcgatcggaggaatgcctgagcgggacatggactcaacagatctgtctgcctgcaatctacaaggttttcccaaatagtgcaccccttgaaggagggacaaggctgaccatatgtggctgggactttggatttcggaggaataataaatttgatttaaagaaaactagagttctccttggaaatgagagctgcaccttgactttaagtgagagcacgatgaatacattgaaatgcacagttggtcctgccatgaataagcatttcaatatgtccataattatttcaaatggccacgggacaacacaatacagtacattctcctatgtggatcctgtaataacaagtatttcgccgaaatacggtcctatggctggtggcactttacttactttaactggaaattacctaaacagtgggaattctagacacatttcaattggtggaaaaacatgtactctaaaaaggtgtggtaaatttattttttgttgcatctgtcaatttgaattaatatctgtaccttaaaaatt

SEQ ID NO: 204 - protein, 691 aa, Homo Sapiens [sequence omitted]

SEQ ID NO: 205 - DNA, 2294 bp, Homo Sapiens
atgaaggcccccgctgtgcttgcacctggcatcctcgtgctcctgtttaccttggtgcagaggagcaatggggagtgtaaagaggcactagcaaagtccgagatgaatgtgaatatgaagtatcagcttcccaacttcaccgcggaaacacccatccagaatgtcattctacatgagcatcacattttccttggtgccactaactacatttatgttttaaatgaggaagaccttcagaaggttgctgagtacaagactgggcctgtgctggaacacccagattgtttcccatgtcaggactgcagcagcaaagccaatttatcaggaggtgtttggaaagataacatcaacatggctctagttgtcgacacctactatgatgatcaactcattagctgtggcagcgtcaacagagggacctgccagcgacatgtctttccccacaatcatactgctgacatacagtcggaggttcactgcatattctccccacagatagaagagcccagccagtgtcctgactgtgtggtgagcgccctgggagccaaagtcctttcatctgtaaaggaccggttcatcaacttctttgtaggcaataccataaattcttcttatttcccagatcatccattgcattcgatatcagtgagaaggctaaaggaaacgaaagatggttttatgtttttgacggaccagtcctacattgatgttttacctgagttcagagattcttaccccattaagtatgtccatgcctttgaaagcaacaattttatttacttcttgacggtccaaagggaaactctagatgctcagacttttcacacaagaataatcaggttctgttccataaactctggattgcattcctacatggaaatgcctctggagtgtattctcacagaaaagagaaaaaagagatccacaaagaaggaagtgtttaatatacttcaggctgcgtatgtcagcaagcctggggcccagcttgctagacaaataggagccagcctgaatgatgacattcttttcggggtgttcgcacaaagcaagccagattctgccgaaccaatggatcgatctgccatgtgtgcattccctatcaaatatgtcaacgacttcttcaacaagatcgtcaacaaaaacaatgtgagatgtctccagcatttttacggacccaatcatgagcactgctttaataggacacttctgagaaattcatcaggctgtgaagcgcgccgtgatgaatatcgaacagagtttaccacagctttgcagcgcgttgacttattcatgggtcaattcagcgaagtcctcttaacatctatatccaccttcattaaaggagacctcaccatagctaatcttgggacatcagagggtcgcttcatgcaggttgtggtttctcgatcaggaccatcaacccctcatgtgaattttctcctggactcccatccagtgtctccagaagtgattgtggagcatacattaaaccaaaatggctacacactggttatcactgggaagaagatcgcgaagatcccattgaatggcttgggttgcagacatttccagtcctgcagtcaatgcctctctgccccaccctttgttcagtgtggctggtgccacgacaaatgtgtgcgatcggaggaatgcctgagcgggacatggactcaacagatctgtctgcctgcaatctacaaggttttcccaaatagtgcaccccttgaaggagggacaaggctgaccatatgtggctgggactttggatttcggaggaataataaatttgatttaaagaaaactagagttctccttggaaatgagagctgcaccttgactttaagtgagagcacgatgaatacattgaaatgcacagttggtcctgccatgaataagcatttcaatatgtccataattatttcaaatggccacgggacaacacagtacagtacattctcctatgtgctcccctccaggatcctgtaataacaagtatttcgccgaaatacggtcctatggctggtggcactttacttactttaactggaaattacctaaacagtgggaattctagacacatttcaattggtggaaaaacatgtactttaaaaagtgtgtcaaacagtattcttgaatgttataccccagcccaaaccatttcaactgagtttgctgttaaattgaaaattgacttagccaaccgagagacaagcatcttcagttaccgtgaagatcccattgtctatgaaattcatccaaccaaatcttttattaggtaagtagaagcttctgat

SEQ ID NO: 206 - protein, 661 aa, Homo Sapiens [sequence omitted]

SEQ ID NO: 207 - DNA, 3256 bp, Homo Sapiens
atgaaggcccccgctgtgcttgcacctggcatcctcgtgctcctgtttaccttggtgcagaggagcaatggggagtgtaaagaggcactagcaaagtccgagatgaatgtgaatatgaagtatcagcttcccaacttcaccgcggaaacacccatccagaatgtcattctacatgagcatcacattttccttggtgccactaactacatttatgttttaaatgaggaagaccttcagaaggttgctgagtacaagactgggcctgtgctggaacacccagattgtttcccatgtcaggactgcagcagcaaagccaatttatcaggaggtgtttggaaagataacatcaacatggctctagttgtcgacacctactatgatgatcaactcattagctgtggcagcgtcaacagagggacctgccagcgacatgtctttccccacaatcatactgctgacatacagtcggaggttcactgcatattctccccacagatagaagagcccagccagtgtcctgactgtgtggtgagcgccctgggagccaaagtcctttcatctgtaaaggaccggttcatcaacttctttgtaggcaataccataaattcttcttatttcccagatcatccattgcattcgatatcagtgagaaggctaaaggaaacgaaagatggttttatgtttttgacggaccagtcctacattgatgttttacctgagttcagagattcttaccccattaagtatgtccatgcctttgaaagcaacaattttatttacttcttgacggtccaaagggaaactctagatgctcagacttttcacacaagaataatcaggttctgttccataaactctggattgcattcctacatggaaatgcctctggagtgtattctcacagaaaagagaaaaaagagatccacaaagaaggaagtgtttaatatacttcaggctgcgtatgtcagcaagcctggggcccagcttgctagacaaataggagccagcctgaatgatgacattcttttcggggtgttcgcacaaagcaagccagattctgccgaaccaatggatcgatctgccatgtgtgcattccctatcaaatatgtcaacgacttcttcaacaagatcgtcaacaaaaacgatgtgagatgtctccagcatttttacggacccaatcatgagcactgctttaatgggacacttctgagaaattcatcaggctgtgaagcgcgccgtgatgaatatcgaacagagtttaccacagctttgcagcgcgttgacttattcatgggtcaattcagcgaagtcctcttaacatctatatccaccttcattaaaggagacctcaccatagctaatcttgggacatcagagggtcgcttcatgcaggttgtggtttctcgatcaggaccatcaacccctcgtgtgaattttctcctggactcccatccagtgtctccagaagtgattgtggagcatacattaaaccaaaatggctacacactggttatcactgggaagaagatcacgaagatcccattgaatggtttgggctgcagacatttccagtcctgcagtcaatgcctctctgccccaccctttgttcagtgtggctggtgctacgacaaatgtgtgcgatcggaggaatgcctgagcgggacatggactcaacagatctgtctgcctgcaatctacaaggttttcccaaatagtgcaccccttgaaggagggacaaggctgaccatatgtggctgggactttggatttcggaggaataataaatttgatttaaagaaaactagagttctccttggaaatgagagctgcaccttgactttaagtgagagcacgatgaatacatcgaaatgcacagttggtcctgccatgaataagcatttcaatatgtccataattatttcaaatggccacgggacaacacaatacagtacattctcctatgtggatcctgtaataacaagtatttcgccgaaatacggtcctatggctggtggcactttacttactttaactggaaattacctaaacagtgggaattctagacacatttcaattggtgggaaaacatgtactttaaaaagtgtgtcaaacagtattcttgaatgttataccccagcccaaaccatttcaactgagtttgctgttaaattgaaaattgacttagccaaccgagagacaagcatcttcagttaccgtgaagatcccattgtctatgtaattcatccaaccaaatcttttattaggtaagtagaagcttctgatgggtataagaaaacaatgaatacaaggatgattttgctgtagaatagtcaagaggaattgcagttttatctctggctttgatgctgttatgttgcttttgaaggcttctttccaattcaggagagaaaactatattcaggttctgagtgtagtttgacttatcaatgctagttcattccaagaagtatcttatcctgttctattacatttaaacagagtatagcaaaatagtttaatgtggcattgtagtatacatgcacttacattatgtacatatcaattctatactaaccttagtgcccagaagtggaattaccttttttcttccattctctagatatgtttttgtcctgcctgctttacacacagcttttctttatgccagactctctttgaattgatatctcattggacccagttcaatctgccttgttcccgttaattctatcagtctagcaacaatagttaagttcggttttctttgtatttttttcagaggtgaaatatttattttgtgtaattcggtgaataaaatacaaatgcatttcttaagcttatgaaatatgcattttaaaaatattttcaagttaaataagttgtttccaaagaacagttacccatgaacttccatttgatgttgactgtgcctctgacctgtaatcagtgcaggtgattaaattgaatccctctcttacagtacttggtggaaagaacctctcaacattgtcagttttctattttgctttgccagtggtgggagcacaataacaggtgttgggaaaaacctgaattcagttagtgtcccgagaatggtcataaatgtgcatgaagcaggaaggaactttacagtggtaagtcctttgagcaatggttctactcagagctctgcatctttgcctctaaccatgtggctttcatggtacctgagacatctcagtttcgcctttaaggtttgctagttaatttccttgca

SEQ ID NO: 208 - protein, 755 aa, Homo Sapiens [sequence omitted]

SEQ ID NO: 209 - DNA, 2481 bp, Homo Sapiens
atgaaggcccccgctgtgcttgcacctggcatcctcgtgctcctgtttaccttggtgcagaggagcaatggggagtgtaaagaggcactagcaaagtccgagatgaatgtgaatacgaagtatcagcttcccaacttcaccgcggaaacacccatccagaatgtcattctacatgagcatcacattttccttggtgccactaactacatttatgttttaaatgaggaagaccttcagaaggttgctgagtacaagactgggcctgtgctggaacacccagattgtttcccatgtcaggactgcagcagcaaagccaatttatcaggaggtgtttggaaagataacatcaacatggctctagttgtcgacacctactatgatgatcaactcattagctgtggcagcgtcaacagagggacctgccagcgacatgtctttccccacaatcatactgctgacatacagtcggaggttcactgcatattctccccacagatagaagagcccagccagtgtcctgactgtgtggtgagcgccctgggagccaaagtcctttcatctgtaaaggaccggttcatcaacttctttgtaggcaataccataaattcttcttatttcccagatcatccattgcattcgatatcagtgagaaggctaaaggaaacgaaagatggttttatgtttttgacggaccagtcctacattgatgttttacctgagttcagagattcttaccccattaagtatgtccatgcctttgaaagcaacaattttatttacttcttgacggtccaaagggaaactctagatgctcagacttttcacacaagaataatcaggttctgttccataaactctggattgcattcctacatggaaatgcctctggagtgtattctcacagaaaagagaaaaaagagatccacaaagaaggaagtgtttaatatacttcaggctgcgtatgtcagcaagcctggggcccagcttgctagacaaataggagccagcctgaatgatgacattcttttcggggtgttcgcacaaagcaagccagattctgccgaaccaatggatcgatctgccatgtgtgcattccctatcaaatatgtcaacgacttcttcaacaagatcgtcaacaaaaacaatgtgagatgtctccagcatttttacggacccaatcatgagcactgctttaataggacacttctgagaaattcatcaggctgtgaagcgcgccgtgatgaatatcgaacagagtttaccacagctttgcagcgcgttgacttattcatgggtcaattcagcgaagtcctcttaacatctatatccaccttcattaaaggagacctcaccatagctaatcttgggacatcagagggtcgcttcatgcaggttgtggtttctcgatcaggaccatcaacccctcatgtgaattttctcctggactcccatccagtgtctccagaagtgattgtggagcatacattaaaccaaaatggctacacactggttatcactgggaagaagatcacgaagatcccattgaatggcttgggctgcagacatttccagtcctgcagtcaatgcctctctgccccaccctttgttcagtgtggctggtgccacgacaaatgtgtgcgatcggaggaatgcctgagcgggacatggactcaacagatctgtctgcctgcaatctacaaggttttcccaaatagtgcaccccttgaaggagggacaaggctgaccatatgtggctgggactttggatttcggaggaataataaatttgatttaaagaaaactagagttctccttggaaatgagagctgcaccttgactttaagtgagagcacgatgaatacattgaaatgcacagttggtcctgccatgaataagcatttcaatatgtccataattatttcaaatggccacgggacaacacaatacagtacattctcctatgtggatcctgtaataacaagtatttcgccgaaatacggtcctatggctggtggcactttacttactttaactggaaattacctaaacagtgggaattctagacacatttcaattggtggaaaaacatgtactttaaaaagtgtgtcaaacagtattcttgaatgttataccccagcccaaaccatttcaactgagtttgctgttaaattgaaaattgacttaaccaaccgagagacaagcatcttcagttaccgtgaagatcccattgtctatgaaattcatccaaccaaatcttttattagtggtgggagcacaataacaggtgttgggaaaaacctgaattcagttagtgtcccgagaatggtcataaatgtgcatgaagcaggaaggaactttacagtggtaagtcctttgagcaatggttctactcagagctctgcatctttgcctctaaccatgtggctttcatggtacctgagacatctcagtttcgcctttaaggtttgctagttaatttcc

SEQ ID NO: 210 - protein, 823 aa, Homo Sapiens [sequence omitted]

SEQ ID NO: 211 - DNA, 2667 bp, Homo Sapiens
atgaaggcccccgctgtgcttgcacctggcatcctcgtgctcctgtttaccttggtgcagaggagcaatggggagtgtaaagaggcactagcaaagtccgagatgaatgtgaatatgaagtatcagcttcccaacttcaccgcggaaacacccatccagaatgtcattctacatgagcatcacattttccttggtgccactaactacatttatgttttaaatgaggaagaccttcagaaggttgctgagtacaagactgggcctgtgctggaacacccagattgtttcccatgtcaggactgcagcagcaaagccaatttatcaggaggtgtttggaaagataacatcaacatggctctagttgtcgacacctactatgatgatcaactcattagctgtggcagcgtcaacagagggacctgccagcgacatgtctttccccgcaatcatactgctgacatacagtcggaggttcactgcatattctccccacagatagaagagcccagccagtgtcctgactgtgtggtgagcgccctgggagccaaagtcctttcatctgtaaaggaccggttcaccaacttctttgtaggcaataccataaattcttcttatttcccagatcatccattgcattcgatatcagtgagaaggctaaaggaaacgaaagatggttttatgtttttgacggaccagtcctacattgatgttttacctgagttcagagattcttaccccattaagtatgtccatgcctttgaaagcaacaattttatttacttcttgacggtccaaagggaaactctagatgctcagacttttcacacaagaataatcaggttctgttccataaactctggattgcattcctacatggaaatgcctctggagtgtattctcacagaaaagagaaaaaagagatccacaaagaaggaagtgtttaatatacttcaggctgcgtatgtcagcaagcctggggcccagcttgctagacaaataggagccagcccgaatgatgacattcttttcggagtgttcgcacaaagcaagccagattctgccgaaccaatggatcgatctgccatgtgtgcattccctatcaaatatgtcaacgacttcttcaacaagatcgtcaacaaaaacaatgtgagatgtctccagcatttttacggacccaatcatgagcactgctttaataggacacttctgagaaattcatcaggctgtgaagcgcgccgtgatgaatatcgaacagagttcaccacagctttgcagcgcgttgacttattcatgggtcaattcagcgaagtcctcttaacatctatatccaccttcattaaaggagacctcaccatagctaatcttgggacatcagagggtcgcttcatgcaggttgtggtttctcgatcaggaccatcaacccctcatgtgaattttctcctggactcccatccagtgtctccagaagtgattgtggagcatacattaaaccaaaatggctacacactggttatcactgggaagaagatcacgaagatcccattgaatggcttgggctgcagacatttccagtcctgcagtcaatgcctctctgccccaccctttgttcagtgtggctggtgccacgacaaatgtgtgcgatcggaggaatgcctgagcgggacatggactcaacagatctgtctgcctgcaatctacaaggttttcccaaatagtgcaccccttgaaggagggacaaggctgaccatatgtggctgggactttggatttcggaggaataataaatttgatttaaagaaaactagagttctccttggaaatgagagctgcaccttgactttaagtgagagcacgatgaatacattgaaatgcacagttggtcctgccatgaataagcatttcaatatgtccataattatttcaaatggccacgggacaacacaatacagtacattctcctatgtggatcctgtaataacaagtatttcgccgaaatacggtcctatggctggtggcactttacttactttaactggaaattacctaaacagtgggaattctagacacatttcaattggtggaaaaacatgtactttaaaaagtgtgtcaaacagtattcttgaatgttataccccagcccaaaccatttcaactgagtttgctgttaaattgaaaattgacttagccaaccgagagacaagcatcttcagttaccgtgaagatcccattgtctatgaaattcatccaaccaaatcttttattagtggtgggagcacaataacaggtgttgggaaaaacctgaattcagttagtgtcccgagaatggtcataaatgtgcatgaagcgggaaggaactttacagtggcatgtcaacatcgctctaattcagagataatctgttgtaccactccttccctgcaacagctgaatctgcaactccccctgaaaaccaaagcctttttcatgttagatgggatcctttccaaatactttgatctcatttatgtacataatcctgtgtttaagccttttgaaaagccagtgatgatctcaatgggcaatgaaaatgtactggaaattaaggtaagaaatgctttaaacactgtcttaaatcatcagctcaaacttaattgacttcatagctatgtgaatacaattgttgtactt

SEQ ID NO: 212 - protein, 877 aa, Homo Sapiens [sequence omitted]

SEQ ID NO: 213 - DNA, 2542 bp, Homo Sapiens
atgaaggcccccgctgtgcttgcacctggcatcctcgtgctcctgtttaccttggtgcagaggagcaatggggagtgtaaagaggcactagcaaagtccgagatgaatgtgaatatgaagtatcagcttcccaacttcaccgcggaaacacccatccagaatgtcattctacatgagcatcacattttccttggtgccactaactacatttatgttttaaatgaggaagaccttcagaaggttgctgagtacaagactgggcctgtgctggaacacccagattgtttcccatgtcaggactgcagcagcaaagccaatttatcaggaggtgtttggaaagataacatcaacatggctctagttgtcgacacctactatgatgatcaactcattagctgtggcagcgtcaacagagggacctgccagcgacatgtctttccccacaatcatactgctgacatacagtcggaggttcactgcatattctccccacagatagaagagcccagccagtgtcctgactgtgtggtgagcgccctgggagccaaagtcctttcatctgtaaaggaccggttcatcaacttctttgtaggcaataccataaattcttcttatttcccagatcatccattgcattcgatatcagtgagaaggctaaaggaaacgaaagatggttttatgtttttgacggaccagtcctacattgatgctttacctgagttcagagattcttaccccattaagtatgtccatgcctttgaaagcaacaattttatttacttcttgacggtccaaagggaaactctagatgctcagacttttcacacaagaataatcaggttctgttccataaactctggattgcattcctacatggaaatgcctctggagtgtattctcacagaaaagagaaaaaagagatccacaaagaaggaagtgtttaatatacttcaggctgcgtatgtcagcaagcctggggcccagcttgctagacaaataggagccagcctgaatgatgacattcttttcggggtgttcgcacaaagcaagccagattctgccgaaccaatggatcgatctgccatgtgtgcattccctatcaaatatgtcaacgacttcttcaacaagatcgtcaacaaaaacaatgtgagatgtctccagcatttttacggacccaatcatgagcactgctttaataggacacttctgagaaattcatcaggctgtgaagcgcgccgtgatgaatatcgaacagagtttaccacagctttgcagcgcgttgacttattcatgggtcaattcagcgaagtcctcttaacatctatatccaccttcattaaaggagacctcaccatagctaatcttgggacatcagagggtcgcttcatgcaggttgtggtttctcgatcaggaccatcaacccctcatgtgaattttctcctggactcccatccagtgtctccagaagtgattgtggagcatacattaaaccaaaatggctacacactggttatcactgggaggaagatcacgaagatcccattgaatggcttgggctgcagacatttccagtcctgcagtcaatgcctctctgccccaccctttgttcagtgtggctggtgccacgacaaatgtgtgcgatcggaggaatgcctgagcgggacatggactcagcagatctgtctgcctgcaatctacaaggttttcccaaatagtgcaccccttgaaggagggacaaggctgaccatatgtggctgggactttggatttcggaggaataataaatttgatttaaagaaaactagagttctccttggaaatgagagctgcaccttgactttaagtgagagcacgatgaatacattgaaatgcacagttggtcctgccatgaataagcatttcaatatgtccataattatttcaaatggccacgggacaacacaatacagtacattctcctatgtggatcctgtaataacaagtatttcgccgaaatacggtcctatggctggtggcactttacttactttaactggaaattacctaaacagtgggaattctagacacatttcaattggtggaaaaacgtgtactttaaaaagtgtgtcaaacagtattcttgaatgttataccccagcccaaaccatttcaactgagtctgctgttaaattgaaaattgacttagccaaccgagagacaagcatcttcagttaccgtgaagatcccattgtctatgaaattcatccaaccaaatcttttattaggcatgtcaacatcgctctaattcagagataatctgttgtaccactccttccctgcaacagctgaatctgcaactccccctgaaaaccaaagcctttttcatgttagatgggatcctttccaaatactttgatctcatttatgtacataatcctgtgtctaagccttttggaaagccagtgatgatctcaatgggcaatgaaaatgtactggaaattaagataagaaatgctttaaacactgtcttaaatcatcagctcaaacttaattgacttcatag

SEQ ID NO: 214 - protein, 764 aa, Homo Sapiens [sequence omitted]

SEQ ID NO: 215 - DNA, 3113 bp, Homo Sapiens
ggtcccagctcgcctcgatggagctcctcccgccgctgcctcagtccttcctgttgctgctgctgttgcctgccaagcccgcggcgggcgaggactggcagtgcccgcgcaccccctacgcggcctctcgcgactttgacgtgaagtacgtggtgcccagcttctccgccggaggcctggtacaggccatggtgacctacgagggcgacagaaatgagagtgctgtgtttgtagccatacgcaatcgcctgcatgtgcttgggcctgacctgaagtctgtccagagcctggccacgggccctgctggagaccctggctgccagacgtgtgcagcctgtggcccaggaccccacggccctcccggtgacacagacacaaaggtgctggtgctggatcccgcgctgcctgcgctggtcagttgtggctccagcctgcagggccgctgcttcctgcatgacctagagccccaagggacagccgtgcatctggcagcgccagcctgcctcttctcagcccaccataaccggcccgatgactgccccgactgtgtggccagcccattgggcacccgtgtaactgtggttgagcaaggccaggcctcctatttctacgtggcatcctcactggacgcagccgtggctgccagcttcagcccacgctcagtgtctatcaggcgtctcaaggctgacgcctcgggattcgcaccgggctttgtggcgttgtcagtgctgcccaagcatcttgtctcctacagtattgaatacgtgcacagcttccacacgggagccttcgtatacttcctgactgtacagccggccagcgtgacagatgatcctagtgccctgcacacacgcctggcacggcttagcgccactgagccagagttgggtgactatcgggagctggtcctcgactgcagatttgctccaaaacgcaggcgccggggggccccagaaggcggacagccctaccctgtgctgcgggtggcccactccgctccagtgggtgcccaacttgccactgagctgagcatcgccgagggccaggaagtactatttggggtctttgtgactggcaaggatggtggtcctggcgtgggccccaactctgtcgtctgtgccttccccattgacctgctggacacactaattgatgagggtgtggagcgctgttgtgaatccccagtccatccaggcctccggcgaggcctcgacttcttccagtcgcccagtttttgccccaacccggttttccaggtacctatccaaggccctggctgccgccacttcctgacctgtgggcgttgcctaagggcatggcatttcatgggctgtggctggtgtgggaacatgtgcggccagcagaaggagtgtcctggctcctggcaacaggaccactgcccacctaagcttactgagttccacccccacagtggacctctaaggggcagtacaaggctgaccctgtgtggctccaacttctaccttcacccttctggtctggtgcctgagggaacccatcaggtcactgtgggccaaagtccctgccggccactgcccaaggacagctcaaaactcaggtacaatctggtccctcccctccctttccctgaagggggaaaccaagcagccccttccccatgagaccctgttctctgcttatcagaggcaaggggggatgggggaagctgcagtggttctgactgctttttgagagtcaaaaaggtctctgtccctttttgagctttcatgtgcccttcctgtctgttcactcatggaccagccaaggttaatctctgccccaccagaaccttccttccatggagggaggcatgggtggagaaatgccattctctggctcagaggagccctgtggcttgtggcaggcatgcatctaggcctgtgtaattcctggctgacctcaggggttcccctggtgccccagaccagtgccccggaaagactttgtagaggagtttgagtgtgaactggagcccttgggcacccaggcagtggggcctaccaacgtcagcctcaccgtgactaacatgccaccgggcaagcacttccgggtagacggcacctccgtgctgagaggcttctctttcatggagccagtgctgatagcagtgcaacccctctttggcccacgggcaggaggcacctgtctcactcttgaaggccagagtctgtctgtaggcaccagccgggctgtgctggtcaatgggactgagtgtctgctagcacgggtcagtgaggggcagcttttatgtgccacaccccctggggccacggtggccagtgtcccccttagcctgcaggtggggggtgcccaggtacctggttcctggaccttccagtacagagaagaccctgtcgtgctaagcatcagccccaactgtggctacatcaactcccacatcaccatctgtggccagcatctaacttcagcatggcacttagtgctgtcattccatgacgggcttagggcagtggaaagcaggtgtgagaggcagcttccagagcagcagctgtgccgccttcctgaatatgtggtccgagacccccagggatgggtggcagggaatctgagtgcccgaggggatggagctgctggctttacactgcctggctttcgcttcctacccccaccccatccacccagtgccaacctagttccactgaagcctgaggagcatgccattaagtttgaggtaagtgtaagggataggggcagggacagttggggatctgaaagtaggggccagcctactggctggtcctcatgaccctctctgcagtatattgggctgggcgctgtggctgactgtgtgggtatcaacgtgaccgtgggtggtgagagctgccagcacgagttccggggggacatggttgtctgccccctgcccccatccctgcagcttggccaggatggtgccccattgcaggtctgcgtagatggtgaatgtcatatcctgggtagagtggtgcggccagggccagatggggtcccacagagcacgctccttggtatcctgctgcctttgctgctgcttgtggctgcactggcgactgcactggtcttcagctactggtggcggaggaagcagctag

SEQ ID NO: 216 - protein, 541 aa, Homo Sapiens
MELLPPLPQSFLLLLLLPAKPAAGEDWQCPRTPYAASRDFDVKYVVPSFSAGGLVQAMVTYEGDRNESAVFVAIRNRLHVLGPDLKSVQSLATGPAGDPGCQTCAACGPGPHGPPGDTDTKVLVLDPALPALVSCGSSLQGRCFLHDLEPQGTAVHLAAPACLFSAHHNRPDDCPDCVASPLGTRVTVVEQGQASYFYVASSLDAAVAASFSPRSVSIRRLKADASGFAPGFVALSVLPKHLVSYSIEYVHSFHTGAFVYFLTVQPASVTDDPSALHTRLARLSATEPELGDYRELVLDCRFAPKRRRRGAPEGGQPYPVLRVAHSAPVGAQLATELSIAEGQEVLFGVFVTGKDGGPGVGPNSVVCAFPIDLLDTLIDEGVERCCESPVHPGLRRGLDFFQSPSFCPNPVFQVPIQGPGCRHFLTCGRCLRAWHFMGCGWCGNMCGQQKECPGSWQQDHCPPKLTEFHPHSGPLRGSTRLTLCGSNFYLHPSGLVPEGTHQVTVGQSPCRPLPKDSSKLRYNLVPPLPFPEGGNQAAPSP

SEQ ID NO: 217 - DNA, 3069 bp, Homo Sapiens
ggtcccagctcgcctcgatggagctcctcccgccgctgcctcagtccttcctgttgctgctgctgttgcctgccaagcccgcggcgggcgaggactggcagtgcccgcgcaccccctacgcggcctctcgcgactttgacgtgaagtacgtggtgcccagcttctccgccggaggcctggtacaggccatggtgacctacgagggcgacagaaatgagagtgctgtgtttgtagccatacgcaatcgcctgcatgtgcttgggcctgacctgaagtctgtccagagcctggccacgggccctgctggagaccctggctgccagacgtgtgcagcctgtggcccaggaccccacggccctcccggtgacacagacacaaaggtgctggtgctggatcccgcgctgcctgcgctggtcagttgtggctccagcctgcagggccgctgcttcctgcatgacctagagccccaagggacagccgtgcatctggcagcgccagcctgcctcttctcagcccaccataaccggcccgatgactgccccgactgtgtggccagcccattgggcacccgtgtaactgtggttgagcaaggccaggcctcctatttctacgtggcatcctcactggacgcagccgtggctgccagcttcagcccacgctcagtgtctatcaggcgtctcaaggctgacgcctcgggattcgcaccgggctttgtggcgttgtcagtgctgcccaagcatcttgtctcctacagtattgaatacgtgcacagcttccacacgggagccttcgtatacttcctgactgtacagccggccagcgtgacagatgatcctagtgccctgcacacacgcctggcacggcttagcgccactgagccagagttgggtgactatcgggagctggtcctcgactgcagatttgctccaaaacgcaggcgccggggggccccagaaggcggacagccctaccctgtgctgcgggtggcccactccgctccagtgggtgcccaacttgccactgagctgagcatcgccgagggccaggaagtactatttggggtctttgtgactggcaaggatggtggtcctggcgtgggccccaactctgtcgtctgtgccttccccattgacctgctggacacactaattgatgagggtgtggagcgctgttgtgaatccccagtccatccaggcctccggcgaggcctcgacttcttccagtcgcccagtttttgccccaacccgcctggcctggaagccctcagccccaacaccagctgccgccacttccctctgctggtcagtagcagcttctcacgtgtggacctattcaatgggctgttgggaccagtacaggtcactgcattgtatgtgacacgccttgacaacgtcacagtggcacacatgggcacaatggatgggcgtatcctgcaggtggagctggtcaggtcactaaactacttgctgtatgtgtccaacttctcactgggtgacagtgggcagcccgtgcagcgggatgtcagtcgtcttggggaccacctactctttgcctctggggaccaggttttccaggtacctatccaaggccctggctgccgccacttcctgacctgtgggcgttgcctaagggcatggcatttcatgggctgtggctggtgtgggaacatgtgcggccagcagaaggagtgtcctggctcctggcaacaggaccactgcccacctaagcttactgagttccacccccacagtggacctctaaggggcagtacaaggctgaccctgtgtggctccaacttctaccttcacccttctggtctggtgcctgagggaacccatcaggtcactgtgggccaaagtccctgccggccactgcccaaggacagctcaaaactcagaccagtgccccggaaagactttgtagaggagtttgagtgtgaactggagcccttgggcacccaggcagtggggcctaccaacgtcagcctcaccgtgactaacatgccaccgggcaagcacttccgggtagacggcacctccgtgctgagaggcttctctttcatggagccagtgctgatagcagtgcaacccctctttggcccacgggcaggaggcacctgtctcactcttgaaggccagagtctgtctgtaggcaccagccgggctgtgctggtcaatgggactgagtgtctgctagcacgggtcagtgaggggcagcttttatgtgccacaccccctggggccacggtggccagtgtcccccttagcctgcaggtggggggtgcccaggtacctggttcctggaccttccagtacagagaagaccctgtcgtgctaagcatcagccccaactgtggctacatcaactcccacatcaccatctgtggccagcatctaacttcagcatggcacttagtgctgtcattccatgacgggcttagggcagtggaaagcaggcagtgtgagaggcagcttccagagcagcagctgtgccgccttcctgaatatgtggtccgagacccccagggatgggtggcagggaatctgagtgcccgaggggatggagctgctggctttacactgcctggctttcgcttcctacccccaccccatccacccagtgccaacctagttccactgaagcctgaggagcatgccattaagtttgaggtaagtgtaagggataggggcagggacagttggggatctgaaagtaggggccagcctactggctggtcctcatgaccctctctgcagtatattgggctgggcgctgtggctgactgtgtgggtatcaacgtgaccgtgggtggtgagagctgccagcacgagttccggggggacatggttgtctgccccctgcccccatccctgcagcttggccaggatggtgccccattgcaggtctgcgtagatggtgaatgtcatatcctgggtagagtggtgcggccagggccagatggggtcccacagagcacgctccttggtatcctgctgcctttgctgctgcttgtggctgcactggcgactgcactggtcttcagctactggtggcggaggaagcagctag

SEQ ID NO: 218 - protein, 908 aa, Homo Sapiens
MELLPPLPQSFLLLLLLPAKPAAGEDWQCPRTPYAASRDFDVKYVVPSFSAGGLVQAMVTYEGDRNESAVFVAIRNRLHVLGPDLKSVQSLATGPAGDPGCQTCAACGPGPHGPPGDTDTKVLVLDPALPALVSCGSSLQGRCFLHDLEPQGTAVHLAAPACLFSAHHNRPDDCPDCVASPLGTRVTVVEQGQASYFYVASSLDAAVAASFSPRSVSIRRLKADASGFAPGFVALSVLPKHLVSYSIEYVHSFHTGAFVYFLTVQPASVTDDPSALHTRLARLSATEPELGDYRELVLDCRFAPKRRRRGAPEGGQPYPVLRVAHSAPVGAQLATELSIAEGQEVLFGVFVTGKDGGPGVGPNSVVCAFPIDLLDTLIDEGVERCCESPVHPGLRRGLDFFQSPSFCPNPPGLEALSPNTSCRHFPLLVSSSFSRVDLFNGLLGPVQVTALYVTRLDNVTVAHMGTMDGRILQVELVRSLNYLLYVSNFSLGDSGQPVQRDVSRLGDHLLFASGDQVFQVPIQGPGCRHFLTCGRCLRAWHFMGCGWCGNMCGQQKECPGSWQQDHCPPKLTEFHPHSGPLRGSTRLTLCGSNFYLHPSGLVPEGTHQVTVGQSPCRPLPKDSSKLRPVPRKDFVEEFECELEPLGTQAVGPTNVSLTVTNMPPGKHFRVDGTSVLRGFSFMEPVLIAVQPLFGPRAGGTCLTLEGQSLSVGTSRAVLVNGTECLLARVSEGQLLCATPPGATVASVPLSLQVGGAQVPGSWTFQYREDPVVLSISPNCGYINSHITICGQHLTSAWHLVLSFHDGLRAVESRQCERQLPEQQLCRLPEYVVRDPQGWVAGNLSARGDGAAGFTLPGFRFLPPPHPPSANLVPLKPEEHAIKFEVSVRDRGRDSWGSESRGQPTGWSS

SEQ ID NO: 219 - DNA, 3500 bp, Homo Sapiens
ggtcccagctcgcctcgatggagctcctcccgccgctgcctcagtccttcctgttgctgctgctgttgcctgccaagcccgcggcgggcgaggactggcagtgcccgcgcaccccctacgcggcctctcgcgactttgacgtgaagtacgtggtgcccagcttctccgccggaggcctggtacaggccatggtgacctacgagggcgacagaaatgagagtgctgtgtttgtagccatacgcaatcgcctgcatgtgcttgggcctgacctgaagtctgtccagagcctggccacgggccctgctggagaccctggctgccagacgtgtgcagcctgtggcccaggaccccacggccctcccggtgacacagacacaaaggtgctggtgctggatcccgcgctgcctgcgctggtcagttgtggctccagcctgcagggccgctgcttcctgcatgacctagagccccaagggacagccgtgcatctggcagcgccagcctgcctcttctcagcccaccataaccggcccgatgactgccccgactgtgtggccagcccattgggcacccgtgtaactgtggttgagcaaggccaggcctcctatttctacgtggcatcctcactggacgcagccgtggctgccagcttcagcccacgctcagtgtctatcaggcgtctcaaggctgacgcctcgggattcgcaccgggctttgtggcgttgtcagtgctgcccaagcatcttgtctcctacagtattgaatacgtgcacagcttccacacgggagccttcgtatacttcctgactgtacagccggccagcgtgacagatgatcctagtgccctgcacacacgcctggcacggcttagcgccactgagccagagttgggtgactatcgggagctggtcctcgactgcagatttgctccaaaacgcaggcgccggggggccccagaaggcggacagccctaccctgtgctgcgggtggcccactccgctccagtgggtgcccaacttgccactgagctgagcatcgccgagggccaggaagtactatttggggtctttgtgactggcaaggatggtggtcctggcgtgggccccaactctgtcgtctgtgccttccccattgacctgctggacacactaattgatgagggtgtggagcgctgttgtgaatccccagtccatccaggcctccggcgaggcctcgacttcttccagtcgcccagtttttgccccaacccgcctggcctggaagccctcagccccaacaccagctgccgccacttccctctgctggtcagtagcagcttctcacgtgtggacctattcaatgggctgttgggaccagtacaggtcactgcattgtatgtgacacgccttgacaacgtcacagtggcacacatgggcacaatggatgggcgtatcctgcaggtggagctggtcaggtcactaaactacttgctgtatgtgtccaacttctcactgggtgacagtgggcagcccgtgcagcgggatgtcagtcgtcttggggaccacctactctttgcctctggggaccaggttttccaggtacctatccaaggccctggctgccgccacttcctgacctgtgggcgttgcctaagggcatggcatttcatgggctgtggctggtgtgggaacatgtgcggccagcagaaggagtgtcctggctcctggcaacaggaccactgcccacctaagcttactgagttccacccccacagtggacctctaaggggcagtacaaggctgaccctgtgtggctccaacttctaccttcacccttctggtctggtgcctgagggaacccatcaggtcactgtgggccaaagtccctgccggccactgcccaaggacagctcaaaactcaggtacaatctggtccctcccctccctttccctgaagggggaaaccaagcagccccttccccatgagaccctgttctctgcttatcagaggcaaggggggatgggggaagctgcagtggttctgactgctttttgagagtcaaaaaggtctctgtccctttttgagctttcatgtgcccttcctgtctgttcactcatggaccagccaaggttaatctctgccccaccagaaccttccttccatggagggaggcatgggtggagaaatgccattctctggctcagaggagccctgtggcttgtggcaggcatgcatctaggcctgtgtaattcctggctgacctcaggggttcccctggtgccccagaccagtgccccggaaagactttgtagaggagtttgagtgtgaactggagcccttgggcacccaggcagtggggcctaccaacgtcagcctcaccgtgactaacatgccaccgggcaagcacttccgggtagacggcacctccgtgctgagaggcttctctttcatggagccagtgctgatagcagtgcaacccctctttggcccacgggcaggaggcacctgtctcactcttgaaggccagagtctgtctgtaggcaccagccgggctgtgctggtcaatgggactgagtgtctgctagcacgggtcagtgaggggcagcttttatgtgccacaccccctggggccacggtggccagtgtcccccttagcctgcaggtggggggtgcccaggtacctggttcctggaccttccagtacagagaagaccctgtcgtgctaagcatcagccccaactgtggctacatcaactcccacatcaccatctgtggccagcatctaacttcagcatggcacttagtgctgtcattccatgacgggcttagggcagtggaaagcaggtgtgagaggcagcttccagagcagcagctgtgccgccttcctgaatatgtggtccgagacccccagggatgggtggcagggaatctgagtgcccgaggggatggagctgctggctttacactgcctggctttcgcttcctacccccaccccatccacccagtgccaacctagttccactgaagcctgaggagcatgccattaagtttgaggtaagtgtaagggataggggcagggacagttggggatctgaaagtaggggccagcctactggctggtcctcatgaccctctctgcagtatattgggctgggcgctgtggctgactgtgtgggtatcaacgtgaccgtgggtggtgagagctgccagcacgagttccggggggacatggttgtctgccccctgcccccatccctgcagcttggccaggatggtgccccattgcaggtaggcagcccagctggacctccctgggaaacacgggcagagggcctacaggctgggcctgagttgccacctgcccccaggtctgcgtagatggtgaatgtcatatcctgggtagagtggtgcggccagggccagatggggtcccacagagcacgctccttggtatcctgctgcctttgctgctgcttgtggctgcactggcgactgcactggtcttcagctactggtggcggag

SEQ ID NO: 220 - protein, 647 aa, Homo Sapiens
MELLPPLPQSFLLLLLLPAKPAAGEDWQCPRTPYAASRDFDVKYVVPSFSAGGLVQAMVTYEGDRNESAVFVAIRNRLHVLGPDLKSVQSLATGPAGDPGCQTCAACGPGPHGPPGDTDTKVLVLDPALPALVSCGSSLQGRCFLHDLEPQGTAVHLAAPACLFSAHHNRPDDCPDCVASPLGTRVTVVEQGQASYFYVASSLDAAVAASFSPRSVSIRRLKADASGFAPGFVALSVLPKHLVSYSIEYVHSFHTGAFVYFLTVQPASVTDDPSALHTRLARLSATEPELGDYRELVLDCRFAPKRRRRGAPEGGQPYPVLRVAHSAPVGAQLATELSIAEGQEVLFGVFVTGKDGGPGVGPNSVVCAFPIDLLDTLIDEGVERCCESPVHPGLRRGLDFFQSPSFCPNPPGLEALSPNTSCRHFPLLVSSSFSRVDLFNGLLGPVQVTALYVTRLDNVTVAHMGTMDGRILQVELVRSLNYLLYVSNFSLGDSGQPVQRDVSRLGDHLLFASGDQVFQVPIQGPGCRHFLTCGRCLRAWHFMGCGWCGNMCGQQKECPGSWQQDHCPPKLTEFHPHSGPLRGSTRLTLCGSNFYLHPSGLVPEGTHQVTVGQSPCRPLPKDSSKLRYNLVPPLPFPEGGNQAAPSP

SEQ ID NO: 221 - DNA, 2273 bp, Homo Sapiens
ctctggagtatggtctggcgggtgccccctttcttgctccccatcctcttcttggcttctcatgtgggcgcggcggtggacctgacgctgctggccaacctgcggctcacggacccccagcgcttcttcctgacttgcgtgtctggggaggccggggcggggaggggctcggacgcctggggcccgcccctgctgctggagaaggacgaccgtatcgtgcgcaccccgcccgggccacccctgcgcctggcgcgcaacggttcgcaccaggtcacgcttcgcggcttctccaagccctcggacctcgtgggcgtcttctcctgcgtgggcggtgctggggcgcggcgcacgcgcgtcatctacgtgcacaacagccctggagcccacctgcttccagacaaggtcacacacactgtgaacaaaggtgacaccgctgtactttctgcacgtgtgcacaaggagaagcagacagacgtgatctggaagagcaacggatcctacttctacaccctggactggcatgaagcccaggatgggcggttcctgctgcagctcccaaatgtgcagccaccatcgagcggcatctacagtgccacttacctggaagccagccccctgggcagcgccttctttcggctcatcgtgcggggttgtggggctgggcgctgggggccaggctgtaccaaggagtgcccaggttgcctacatggaggtgtctgccacgaccatgacggcgaatgtgtatgcccccctggcttcactggcacccgctgtgaacaggcctgcagagagggccgttttgggcagagctgccaggagcagtgcccaggcatatcaggctgccggggcctcaccttctgcctcccagacccctatggctgctcttgtggatctggctggagaggaagccagtgccaagaagcttgtgcccctggtcattttggggctgattgccgactccagtgccagtgtcagaatggtggcacttgtgaccggttcagtggttgtgtctgcccctctgggtggcatggagtgcactgtgagaagtcagaccggatcccccagatcctcaacatggcctcagaactggagttcaacttagagacgatgccccggatcaactgtgcagctgcagggaaccccttccccgtgcggggcagcatagagctacgcaagccagacggcactgtgctcctgtccaccaaggccattgtggagccagagaagaccacagctgagttcgaggtgccccgcttggttcttgcggacagtgggttctgggagtgccgtgtgtccacatctggcggccaagacagccggcgcttcaaggtcaatgtgaaagtgccccccgtgcccctggctgcacctcggctcctgaccaagcagagccgccagcttgtggtctccccgctggtctcgttctctggggatggacccatctccactgtccgcctgcactaccggccccaggacagtaccatggactggtcgaccattgtggtggaccccagtgagaacgtgacgttaatgaacctgaggccaaagacaggatacagtgttcgtgtgcagctgagccggccaggggaaggaggagagggggcctgggggcctcccaccctcatgaccacagactgtcctgagcctttgttgcagccgtggttggagggctggcatgtggaaggcactgaccggctgcgagtgagctggtccttgcccttggtgcccgggccactggtgggcgacggtttcctgctgcgcctgtgggacgggacacgggggcaggagcggcgggagaacgtctcatccccccaggcccgcactgccctcctgacgggactcacgcctggcacccactaccagctggatgtgcagctctaccactgcaccctcctgggcccggcctcgccccctgcacacgtgcttctgccccccagtgggcctccagccccccgacacctccacgcccaggccctctcagactccgagatccagctgacatggaagcacccggaggctctgcctgggccaatatccaagtacgttgtggaggtgcaggtggctgggggtgcaggagacccactgtggatagacgtggacaggcctgaggagacaagcaccatcatccgtggcctcaacgccagcacgcgctacctcttccgcatgcgggccagcattcaggggctcggggactggagcaacacagtagaagagtccaccctgggcaacggtgagagggcagggcccacaggaccccccgggctctgagcggggag

SEQ ID NO: 222 - protein, 751 aa, Homo Sapiens
MVWRVPPFLLPILFLASHVGAAVDLTLLANLRLTDPQRFFLTCVSGEAGAGRGSDAWGPPLLLEKDDRIVRTPPGPPLRLARNGSHQVTLRGFSKPSDLVGVFSCVGGAGARRTRVIYVHNSPGAHLLPDKVTHTVNKGDTAVLSARVHKEKQTDVIWKSNGSYFYTLDWHEAQDGRFLLQLPNVQPPSSGIYSATYLEASPLGSAFFRLIVRGCGAGRWGPGCTKECPGCLHGGVCHDHDGECVCPPGFTGTRCEQACREGRFGQSCQEQCPGISGCRGLTFCLPDPYGCSCGSGWRGSQCQEACAPGHFGADCRLQCQCQNGGTCDRFSGCVCPSGWHGVHCEKSDRIPQILNMASELEFNLETMPRINCAAAGNPFPVRGSIELRKPDGTVLLSTKAIVEPEKTTAEFEVPRLVLADSGFWECRVSTSGGQDSRRFKVNVKVPPVPLAAPRLLTKQSRQLVVSPLVSFSGDGPISTVRLHYRPQDSTMDWSTIVVDPSENVTLMNLRPKTGYSVRVQLSRPGEGGEGAWGPPTLMTTDCPEPLLQPWLEGWHVEGTDRLRVSWSLPLVPGPLVGDGFLLRLWDGTRGQERRENVSSPQARTALLTGLTPGTHYQLDVQLYHCTLLGPASPPAHVLLPPSGPPAPRHLHAQALSDSEIQLTWKHPEALPGPISKYVVEVQVAGGAGDPLWIDVDRPEETSTIIRGLNASTRYLFRMRASIQGLGDWSNTVEESTLGNGERAGPTGPPGL

SEQ ID NO: 223 - DNA, 2432 bp, Homo Sapiens
catttcgcccggctcgaggtgcaggatgcagagcaaggtgctgctggccgtcgccctgtggctctgcgtggagacccgggccgcctctgtgggtttgcctagtgtttctcttgatctgcccaggctcagcatacaaaaagacatacttacaattaaggctaatacaactcttcaaattacttgcaggggacagagggacttggactggctttggcccaataatcagagtggcagtgagcaaagggtggaggtgactgagtgcagcgatggcctcttctgtaagacactcacaattccaaaagtgatcggaaatgacactggagcctacaagtgcttctaccgggaaactgacttggcctcggtcatttatgtctatgttcaagattacagatctccatttattgcttctgttagtgaccaacatggagtcgtgtacattactgagaacaaaaacaaaactgtggtgattccatgtctcgggtccatttcaaatctcaacgtgtcactttgtgcaagatacccagaaaagagatttgttcctgatggtaacagaatttcctgggacagcaagaagggctttactattcccagctacatgatcagctatgctggcatggtcttctgtgaagcaaaaattaatgatgaaagttaccagtctattatgtacatagttgtcgttgtagggtataggatttatgatgtggttctgagtccgtctcatggaattgaactatctgttggagaaaagcttgtcttaaattgtacagcaagaactgaactaaatgtggggattgacttcaactgggaatacccttcttcgaagcatcagcataagaaacttgtaaaccgagacctaaaaacccagtctgggagtgagatgaagaaatttttgagcaccttaactatagatggtgtaacccggagtgaccaaggattgtacacctgtgcagcatccagtgggctgatgaccaagaagaacagcacatttgtcagggtccatgaaaaaccttttgttgcttttggaagtggcatggaatctctggtggaagccacggtgggggagcgtgtcagaatccctgcgaagtaccttggttacccacccccagaaataaaatggtataaaaatggaataccccttgagtccaatcacacaattaaagcggggcatgtactgacgattatggaagtgagtgaaagagacacaggaaattacactgtcatccttaccaatcccatttcaaaggagaagcagagccatgtggtctctctggttgtgtatgtcccaccccagattggtgagaaatctctaatctctcctgtggattcctaccagtacggcaccactcaaacgctgacatgtacggtctatgccattcctcccccgcatcacatccactggtattggcagttggaggaagagtgcgccaacgagcccagccaagctgtctcagtgacaaacccatacccttgtgaagaatggagaagtgtggaggacttccagggaggaaataaaattgaagttaataaaaatcaatttgctctaattgaaggaaaaaacaaaactgtaagtacccttgttatccaagcggcaaatgtgtcagctttgtacaaatgtgaagcggtcaacaaagtcgggagaggagagagggtgatctccttccacgtgaccaggggtcctgaaattactttgcaacctgacatgcagcccactgagcaggagagcgtgtctttgtggtgcactgcagacagatctacgtttgagaacctcacatggtacaagcttggcccacagcctctgccaatccatgtgggagagttgcccacacctgtttgcaagaacttggatactctttggaaattgaatgccaccatgttctctaatagcacaaatgacattttgatcatggagcttaagaatgcatccttgcaggaccaaggagactatgtctgccttgctcaagacaggaagaccaagaaaagacattgcgtggtcaggcagctcacagtcctagagcgtgtggcacccacgatcacaggaaacctggagaatcagacgacaagtattggggaaagcatcgaagtctcatgcacggcatctgggaatccccctccacagatcatgtggtttaaagataatgagacccttgtagaagactcagagtgaggaaggaggacgaaggcctctacacctgccaggcatgcagtgttcttggctgtgcaaaagtggaggcatttttcataatagaaggtgcccaggaaaagacgaacttggaaatcattattctagtaggcacggcggtgattgccatgttcttctggctacttcttgtcatcatcctacggaccgttaagcgggccaatggaggggaactgaagacaggctacttgtccatcgtcatggatccagatgaactcccattggatgaacattg

SEQ ID NO: 224 - protein, 712 aa, Homo Sapiens
MQSKVLLAVALWLCVETRAASVGLPSVSLDLPRLSIQKDILTIKANTTLQITCRGQRDLDWLWPNNQSGSEQRVEVTECSDGLFCKTLTIPKVIGNDTGAYKCFYRETDLASVIYVYVQDYRSPFIASVSDQHGVVYITENKNKTVVIPCLGSISNLNVSLCARYPEKRFVPDGNRISWDSKKGFTIPSYMISYAGMVFCEAKINDESYQSIMYIVVVVGYRIYDVVLSPSHGIELSVGEKLVLNCTARTELNVGIDFNWEYPSSKHQHKKLVNRDLKTQSGSEMKKFLSTLTIDGVTRSDQGLYTCAASSGLMTKKNSTFVRVHEKPFVAFGSGMESLVEATVGERVRIPAKYLGYPPPEIKWYKNGIPLESNHTIKAGHVLTIMEVSERDTGNYTVILTNPISKEKQSHVVSLVVYVPPQIGEKSLISPVDSYQYGTTQTLTCTVYAIPPPHHIHWYWQLEEECANEPSQAVSVTNPYPCEEWRSVEDFQGGNKIEVNKNQFALIEGKNKTVSTLVIQAANVSALYKCEAVNKVGRGERVISFHVTRGPEITLQPDMQPTEQESVSLWCTADRSTFENLTWYKLGPQPLPIHVGELPTPVCKNLDTLWKLNATMFSNSTNDILIMELKNASLQDQGDYVCLAQDRKTKKRHCVVRQLTVLERVAPTITGNLENQTTSIGESIEVSCTASGNPPPQIMWFKDNETLVEDSE

SEQ ID NO: 225 - DNA, 2620 bp, Homo Sapiens
gcagcggccggagatgcagcggggcgccgcgctgtgcctgcgactgtggctctgcctgggactcctggacggcctggtgagtggctactccatgacccccccgaccttgaacatcacggaggagtcacacgtcatcgacaccggtgacagcctgtccatctcctgcaggggacagcaccccctcgagtgggcttggccaggagctcaggaggcgccagccaccggagacaaggacagcgaggacacgggggtggtgcgagactgcgagggcacagacgccaggccctactgcaaggtgttgctgctgcacgaggtacatgccaacgacacaggcagctacgtctgctactacaagtacatcaaggcacgcatcgagggcaccacggccgccagctcctacgtgttcgtgagagactttgagcagccattcatcaacaagcctgacacgctcttggtcaacaggaaggacgccatgtgggtgccctgtctggtgtccatccccggcctcaatgtcacgctgcgctcgcaaagctcggtgctgtggccagacgggcaggaggtggtgtgggatgaccggcggggcatgctcgtgtccacgccactgctgcacgatgccctgtacctgcagtgcgagaccacctggggagaccaggacttcctttccaaccccttcctggtgcacatcacaggcaacgagctctatgacatccagctgttgcccaggaagtcgctggagctgctggtaggggagaagctggtcctgaactgcaccgtgtgggctgagtttaactcaggtgtcacctttgactgggactacccagggaagcaggcagagcggggtaagtgggtgcccgagcgacgctcccagcagacccacacagaactctccagcatcctgaccatccacaacgtcagccagcacgacctgggctcgtatgtgtgcaaggccaacaacggcatccagcgatttcgggagagcaccgaggtcattgtgcatgaaaatcccttcatcagcgtcgagtggctcaaaggacccatcctggaggccacggcaggagacgagctggtgaagctgcccgtgaagctggcagcgtaccccccgcccgagttccagtggtacaaggatggaaaggcactgtccgggcgccacagtccacatgccctggtgctcaaggaggtgacagaggccagcacaggcacctacaccctcgccctgtggaactccgctgctggcctgaggcgcaacatcagcctggagctggtggtgaatgtgcccccccagatacatgagaaggaggcctcctcccccagcatctactcgcgtcacagccgccaggccctcacctgcacggcctacggggtgcccctgcctctcagcatccagtggcactggcggccctggacaccctgcaagatgtttgcccagcgtagtctccggcggcggcagcagcaagacctcatgccacagtgccgtgactggagggcggtgaccacgcaggatgccgtgaaccccatcgagagcctggacacctggaccgagtttgtggagggaaagaataagactgtgagcaagctggtgatccagaatgccaacgtgtctgccatgtacaagtgtgtggtctccaacaaggtgggccaggatgagcggctcatctacttctatgtgaccaccatccccgacggcttcaccatcgaatccaagccatccgaggagctactagagggccagccggtgctcctgagctgccaagccgacagctacaagtacgagcatctgcgctggtaccgcctcaacctgtccacgctgcacgatgcgcacgggaacccgcttctgctcgactgcaagaacgtgcatctgttcgccacccctctggccgccagcctggaggaggtggcacctggggcgcgccacgccacgctcagcctgagtatcccccgcgtcgcgcccgagcacgagggccactatgtgtgcgaagtgcaagaccggcgcagccatgacaagcactgccacaagaagtacctgtcggtgcaggccctggaagcccctcggctcacgcagaacttgaccgacctcctggtgaacgtgagcgactcgctggagatgcagtgcttggtggccggagcgcacgcgcccagcatcgtgtggtacaaagacgagaggctgctggaggaaaagtctggtagggagggtggccctggcgaagggcaggtccggaggcccgcgaggccgacgatcccaaacccaggtggacccgcacctccaccccaccccctgcaggagtcgacttggcggactccaaccagaagctgagcatccagcgcgtgcgcgaggaggatgcgggacgctatctgtgcagcgtgtgcaacgccaagggctgcgtcaactcctccgccagcgtggccgtggaaggctccgaggataagggcagcatggagatcgtgatccttgtcggtaccggcgtcatcgctgtcttcttctgggtcctcctcctcctcatcttctgtaacatgaggaggccggcccacgcagacatcaagacgggctacctgtccatcatcatggaccccggggaggtgcctctggaggagcaatgcgaatacctgtcctacgatgccagcc

SEQ ID NO: 226 - protein, 765 aa, Homo Sapiens
MQRGAALCLRLWLCLGLLDGLVSGYSMTPPTLNITEESHVIDTGDSLSISCRGQHPLEWAWPGAQEAPATGDKDSEDTGVVRDCEGTDARPYCKVLLLHEVHANDTGSYVCYYKYIKARIEGTTAASSYVFVRDFEQPFINKPDTLLVNRKDAMWVPCLVSIPGLNVTLRSQSSVLWPDGQEVVWDDRRGMLVSTPLLHDALYLQCETTWGDQDFLSNPFLVHITGNELYDIQLLPRKSLELLVGEKLVLNCTVWAEFNSGVTFDWDYPGKQAERGKWVPERRSQQTHTELSSILTIHNVSQHDLGSYVCKANNGIQRFRESTEVIVHENPFISVEWLKGPILEATAGDELVKLPVKLAAYPPPEFQWYKDGKALSGRHSPHALVLKEVTEASTGTYTLALWNSAAGLRRNISLELVVNVPPQIHEKEASSPSIYSRHSRQALTCTAYGVPLPLSIQWHWRPWTPCKMFAQRSLRRRQQQDLMPQCRDWRAVTTQDAVNPIESLDTWTEFVEGKNKTVSKLVIQNANVSAMYKCVVSNKVGQDERLIYFYVTTIPDGFTIESKPSEELLEGQPVLLSCQADSYKYEHLRWYRLNLSTLHDAHGNPLLLDCKNVHLFATPLAASLEEVAPGARHATLSLSIPRVAPEHEGHYVCEVQDRRSHDKHCHKKYLSVQALEAPRLTQNLTDLLVNVSDSLEMQCLVAGAHAPSIVWYKDERLLEEKSGREGGPGEGQVRRPARPTIPNPGGPAPPPHPLQESTWRTPTRS

SEQ ID NO: 227 - DNA, 3096 bp, Homo sapiens
  ref <308>: DATABASE ACCESSION NUMBER: GenBank No. NM006182
  ref <309>: DATABASE ENTRY DATE: 2004-10-26
catcttgcatcagcctgtggatgtatgcctaccaccgggctccttcaccagcaaagtggaaaaagaagcgtttcacaacaaattcttctttttgggttggggaaacgcagtggattatagctctgttttcttctttccaaaactgtgcacccctggatgaaacctccatcaagggagacctacaagttgcctggggttcagtgctctagaaagttccaaggtttgtggcttgaattattctaaagaagctgaaataattgaagagaagcagaggccagctgtttttgaggatcctgctccacagagaatgctctgcacccgttgatactccagttccaacaccatcttctgagatgatcctgattcccagaatgctcttggtgctgttcctgctgctgcctatcttgagttctgcaaaagctcaggttaatccagctatatgccgctatcctctgggcatgtcaggaggccagattccagatgaggacatcacagcttccagtcagtggtcagagtccacagctgccaaatatggaaggctggactcagaagaaggggatggagcctggtgccctgagattccagtggaacctgatgacctgaaggagtttctgcagattgacttgcacaccctccattttatcactctggtggggacccaggggcgccatgcaggaggtcatggcatcgagtttgcccccatgtacaagatcaattacagtcgggatggcactcgctggatctcttggcggaaccgtcatgggaaacaggtgctggatggaaatagtaacccctatgacattttcctaaaggacttggagccgcccattgtagccagatttgtccggttcattccagtcaccgaccactccatgaatgtgtgtatgagagtggagctttacggctgtgtctggctagatggcttggtgtcttacaatgctccagctgggcagcagtttgtactccctggaggttccatcatttatctgaatgattctgtctatgatggagctgttggatacagcatgacagaagggctaggccaattgaccgatggtgtgtctggcctggacgatttcacccagacccatgaataccacgtgtggcccggctatgactatgtgggctggcggaacgagagtgccaccaatggctacattgagatcatgtttgaatttgaccgcatcaggaatttcactaccatgaaggtccactgcaacaacatgtttgctaaaggtgtgaagatctttaaggaggtacagtgctacttccgctctgaagccagtgagtgggaacctaatgccatttccttcccccttgtcctggatgacgtcaaccccagtgctcggtttgtcacggtgcctctccaccaccgaatggccagtgccatcaagtgtcaataccattttgcagatacctggatgatgttcagtgagatcaccttccaatcagatgctgcaatgtacaacaactctgaagccctgcccacctctcctatggcacccacaacctatgatccaatgcttaaagttgatgacagcaacactcggatcctgattggctgcttggtggccatcatctttatcctcctggccatcattgtcatcatcctctggaggcagttctggcagaaaatgctggagaaggcttctcggaggatgctggatgatgaaatgacagtcagcctttccctgccaagtgattctagcatgttcaacaataaccgctcctcatcacctagtgaacaagggtccaactcgacttacgatcgcatctttccccttcgccctgactaccaggagccatccaggctgatacgaaaactcccagaatttgctccaggggaggaggagtcaggctgcagcggtgttgtgaagccagtccagcccagtggccctgagggggtgccccactatgcagaggctgacatagtgaacctccaaggagtgacaggaggcaacacatactcagtgcctgccgtcaccatggacctgctctcaggaaaagatgtggctgtggaggagttccccaggaaactcctaactttcaaagagaagctgggagaaggacagtttggggaggttcatctctgtgaagtggagggaatggaaaaattcaaagacaaagattttgccctagatgtcagtgccaaccagcctgtcctggtggctgtgaaaatgctccgagcagatgccaacaagaatgccaggaatgattttcttaaggagataaagatcatgtctcggctcaaggacccaaacatcatccatctattatctgtgtgtatcactgatgaccctctctgtatgatcactgaatacatggagaatggagatctcaatcagtttctttcccgccacgagccccctaattcttcctccagcgatgtacgcactgtcagttacaccaatctgaagtttatggctacccaaattgcctctggcatgaagtacctttcctctcttaattttgttcaccgagatctggccacacgaaactgtttagtgggtaagaactacacaatcaagatagctgactttggaatgagcaggaacctgtacagtggtgactattaccggatccagggccgggcagtgctccctatccgctggatgtcttgggagagtatcttgctgggcaagttcactacagcaagtgatgtgtgggcctttggggttactttgtgggagactttcaccttttgtcaagaacagccctattcccagctgtcagatgaacaggttattgagaatactggagagttcttccgagaccaagggaggcagacttacctccctcaaccagccatttgtcctgactctgtgtataagctgatgctcagctgctggagaagagatacgaagaaccgtccctcattccaagaaatccaccttctgctccttcaacaaggcgacgagtgatgctgtcagtgcctggccatgttcctacggctcaggtcctccctacaagacctaccactcacccatgcctatgccactccatctggacatttaatgaaactgagagacagaggcttgtttgctttgccctcttttcctggtcacccccactccctacccctgactcatatatact

SEQ ID NO: 228 - DNA, 5616 bp, Homo sapiens
  ref <308>: DATABASE ACCESSION NUMBER: GenBank No. NM005228
  ref <309>: DATABASE ENTRY DATE: 2005-01-26
ccccggcgcagcgcggccgcagcagcctccgccccccgcacggtgtgagcgcccgacgcggccgaggcggccggagtcccgagctagccccggcggccgccgccgcccagaccggacgacaggccacctcgtcggcgtccgcccgagtccccgcctcgccgccaacgccacaaccaccgcgcacggccccctgactccgtccagtattgatcgggagagccggagcgagctcttcggggagcagcgatgcgaccctccgggacggccggggcagcgctcctggcgctgctggctgcgctctgcccggcgagtcgggctctggaggaaaagaaagtttgccaaggcacgagtaacaagctcacgcagttgggcacttttgaagatcattttctcagcctccagaggatgttcaataactgtgaggtggtccttgggaatttggaaattacctatgtgcagaggaattatgatctttccttcttaaagaccatccaggaggtggctggttatgtcctcattgccctcaacacagtggagcgaattcctttggaaaacctgcagatcatcagaggaaatatgtactacgaaaattcctatgccttagcagtcttatctaactatgatgcaaataaaaccggactgaaggagctgcccatgagaaatttacaggaaatcctgcatggcgccgtgcggttcagcaacaaccctgccctgtgcaacgtggagagcatccagtggcgggacatagtcagcagtgactttctcagcaacatgtcgatggacttccagaaccacctgggcagctgccaaaagtgtgatccaagctgtcccaatgggagctgctggggtgcaggagaggagaactgccagaaactgaccaaaatcatctgtgcccagcagtgctccgggcgctgccgtggcaagtcccccagtgactgctgccacaaccagtgtgctgcaggctgcacaggcccccgggagagcgactgcctggtctgccgcaaattccgagacgaagccacgtgcaaggacacctgccccccactcatgctctacaaccccaccacgtaccagatggatgtgaaccccgagggcaaatacagctttggtgccacctgcgtgaagaagtgtccccgtaattatgtggtgacagatcacggctcgtgcgtccgagcctgtggggccgacagctatgagatggaggaagacggcgtccgcaagtgtaagaagtgcgaagggccttgccgcaaagtgtgtaacggaataggtattggtgaatttaaagactcactctccataaatgctacgaatattaaacacttcaaaaactgcacctccatcagtggcgatctccacatcctgccggtggcatttaggggtgactccttcacacatactcctcctctggatccacaggaactggatattctgaaaaccgtaaaggaaatcacagggtttttgctgattcaggcttggcctgaaaacaggacggacctccatgcctttgagaacctagaaatcatacgcggcaggaccaagcaacatggtcagttttctcttgcagtcgtcagcctgaacataacatccttgggattacgctccctcaaggagataagtgatggagatgtgataatttcaggaaacaaaaatttgtgctatgcaaatacaataaactggaaaaaactgtttgggacctccggtcagaaaaccaaaattataagcaacagaggtgaaaacagctgcaaggccacaggccaggtctgccatgccttgtgctcccccgagggctgctggggcccggagcccagggactgcgtctcttgccggaatgtcagccgaggcagggaatgcgtggacaagtgcaaccttctggagggtgagccaagggagtttgtggagaactctgagtgcatacagtgccacccagagtgcctgcctcaggccatgaacatcacctgcacaggacggggaccagacaactgtatccagtgtgcccactacattgacggcccccactgcgtcaagacctgcccggcaggagtcatgggagaaaacaacaccctggtctggaagtacgcagacgccggccatgtgtgccacctgtgccatccaaactgcacctacggatgcactgggccaggtcttgaaggctgtccaacgaatgggcctaagatcccgtccatcgccactgggatggtgggggccctcctcttgctgctggtggtggccctggggatcggcctcttcatgcgaaggcgccacatcgttcggaagcgcacgctgcggaggctgctgcaggagagggagcttgtggagcctcttacacccagtggagaagctcccaaccaagctctcttgaggatcttgaaggaaactgaattcaaaaagatcaaagtgctgggctccggtgcgttcggcacggtgtataagggactctggatcccagaaggtgagaaagttaaaattcccgtcgctatcaaggaattaagagaagcaacatctccgaaagccaacaaggaaatcctcgatgaagcctacgtgatggccagcgtggacaacccccacgtgtgccgcctgctgggcatctgcctcacctccaccgtgcagctcatcacgcagctcatgcccttcggctgcctcctggactatgtccgggaacacaaagacaatattggctcccagtacctgctcaactggtgtgtgcagatcgcaaagggcatgaactacttggaggaccgtcgcttggtgcaccgcgacctggcagccaggaacgtactggtgaaaacaccgcagcatgtcaagatcacagattttgggctggccaaactgctgggtgcggaagagaaagaataccatgcagaaggaggcaaagtgcctatcaagtggatggcattggaatcaattttacacagaatctatacccaccagagtgatgtctggagctacggggtgaccgtttgggagttgatgacctttggatccaagccatatgacggaatccctgccagcgagatctcctccatcctggagaaaggagaacgcctccctcagccacccatatgtaccatcgatgtctacatgatcatggtcaagtgctggatgatagacgcagatagtcgcccaaagttccgtgagttgatcatcgaattctccaaaatggcccgagacccccagcgctaccttgtcattcagggggatgaaagaatgcatttgccaagtcctacagactccaacttctaccgtgccctgatggatgaagaagacatggacgacgtggtggatgccgacgagtacctcatcccacagcagggcttcttcagcagcccctccacgtcacggactcccctcctgagctctctgagtgcaaccagcaacaattccaccgtggcttgcattgatagaaatgggctgcaaagctgtcccatcaaggaagacagcttcttgcagcgatacagctcagaccccacaggcgccttgactgaggacagcatagacgacaccttcctcccagtgcctgaatacataaaccagtccgttcccaaaaggcccgctggctctgtgcagaatcctgtctatcacaatcagcctctgaaccccgcgcccagcagagacccacactaccaggacccccacagcactgcagtgggcaaccccgagtatctcaacactgtccagcccacctgtgtcaacagcacattcgacagccctgcccactgggcccagaaaggcagccaccaaattagcctggacaaccctgactaccagcaggacttctttcccaaggaagccaagccaaatggcatctttaagggctccacagctgaaaatgcagaatacctaagggtcgcgccacaaagcagtgaatttattggagcatgaccacggaggatagtatgagccctaaaaatccagactctttcgatacccaggaccaagccacagcaggtcctccatcccaacagccatgcccgcattagctcttagacccacagactggttttgcaacgtttacaccgactagccaggaagtacttccacctcgggcacattttgggaagttgcattcctttgtcttcaaactgtgaagcatttacagaaacgcatccagcaagaatattgtccctttgagcagaaatttatctttcaaagaggtatatttgaaaaaaaaaaaaagtatatgtgaggatttttattgattggggatcttggagtttttcattgtcgctattgatttttacttcaatgggctcttccaacaaggaagaagcttgctggtagcacttgctaccctgagttcatccaggcccaactgtgagcaaggagcacaagccacaagtcttccagaggatgcttgattccagtggttctgcttcaaggcttccactgcaaaacactaaagatccaagaaggccttcatggccccagcaggccggatcggtactgtatcaagtcatggcaggtacagtaggataagccactctgtcccttcctgggcaaagaagaaacggaggggatggaattcttccttagacttacttttgtaaaaatgtccccacggtacttactccccactgatggaccagtggtttccagtcatgagcgttagactgacttgtttgtcttccattccattgttttgaaactcagtatgctgcccctgtcttgctgtcatgaaatcagcaagagaggatgacacatcaaataataactcggattccagcccacattggattcatcagcatttggaccaatagcccacagctgagaatgtggaatacctaaggatagcaccgcttttgttctcgcaaaaacgtatctcctaatttgaggctcagatgaaatgcatcaggtcctttggggcatagatcagaagactacaaaaatgaagctgctctgaaatctcctttagccatcaccccaaccccccaaaattagtttgtgttacttatggaagatagttttctccttttacttcacttcaaaagctttttactcaaagagtatatgttccctccaggtcagctgcccccaaaccccctccttacgctttgtcacacaaaaagtgtctctgccttgagtcatctattcaagcacttacagctctggccacaacagggcattttacaggtgcgaatgacagtagcattatgagtagtgtggaattcaggtagtaaatatgaaactagggtttgaaattgataatgctttcacaacatttgcagatgttttagaaggaaaaaagttccttcctaaaataatttctctacaattggaagattggaagattcagctagttaggagcccaccttttttcctaatctgtgtgtgccctgtaacctgactggttaacagcagtcctttgtaaacagtgttttaaactctcctagtcaatatccaccccatccaatttatcaaggaagaaatggttcagaaaatattttcagcctacagttatgttcagtcacacacacatacaaaatgttccttttgcttttaaagtaatttttgactcccagatcagtcagagcccctacagcattgttaagaaagtatttgatttttgtctcaatgaaaataaaactatattcatttccactctaaaaaaaaaaaaaaaaa

SEQ ID NO: 229 - DNA, 3963 bp, Homo sapiens
  ref <308>: DATABASE ACCESSION NUMBER: GenBank No. NM004431
  ref <309>: DATABASE ENTRY DATE: 2004-12-20
attaaggactcggggcaggaggggcagaagttgcgcgcaggccggcgggcgggagcggacaccgaggccggcgtgcaggcgtgcgggtgtgcgggagccgggctcggggggatcggaccgagagcgagaagcgcggcatggagctccaggcagcccgcgcctgcttcgccctgctgtggggctgtgcgctggccgcggccgcggcggcgcagggcaaggaagtggtactgctggactttgctgcagctggaggggagctcggctggctcacacacccgtatggcaaagggtgggacctgatgcagaacatcatgaatgacatgccgatctacatgtactccgtgtgcaacgtgatgtctggcgaccaggacaactggctccgcaccaactgggtgtaccgaggagaggctgagcgtatcttcattgagctcaagtttactgtacgtgactgcaacagcttccctggtggcgccagctcctgcaaggagactttcaacctctactatgccgagtcggacctggactacggcaccaacttccagaagcgcctgttcaccaagattgacaccattgcgcccgatgagatcaccgtcagcagcgacttcgaggcacgccacgtgaagctgaacgtggaggagcgctccgtggggccgctcacccgcaaaggcttctacctggccttccaggatatcggtgcctgtgtggcgctgctctccgtccgtgtctactacaagaagtgccccgagctgctgcagggcctggcccacttccctgagaccatcgccggctctgatgcaccttccctggccactgtggccggcacctgtgtggaccatgccgtggtgccaccggggggtgaagagccccgtatgcactgtgcagtggatggcgagtggctggtgcccattgggcagtgcctgtgccaggcaggctacgagaaggtggaggatgcctgccaggcctgctcgcctggattttttaagtttgaggcatctgagagcccctgcttggagtgccctgagcacacgctgccatcccctgagggtgccacctcctgcgagtgtgaggaaggcttcttccgggcacctcaggacccagcgtcgatgccttgcacacgacccccctccgccccacactacctcacagccgtgggcatgggtgccaaggtggagctgcgctggacgccccctcaggacagcgggggccgcgaggacattgtctacagcgtcacctgcgaacagtgctggcccgagtctggggaatgcgggccgtgtgaggccagtgtgcgctactcggagcctcctcacggactgacccgcaccagtgtgacagtgagcgacctggagccccacatgaactacaccttcaccgtggaggcccgcaatggcgtctcaggcctggtaaccagccgcagcttccgtactgccagtgtcagcatcaaccagacagagccccccaaggtgaggctggagggccgcagcaccacctcgcttagcgtctcctggagcatccccccgccgcagcagagccgagtgtggaagtacgaggtcacttaccgcaagaagggagactccaacagctacaatgtgcgccgcaccgagggtttctccgtgaccctggacgacctggccccagacaccacctacctggtccaggtgcaggcactgacgcaggagggccagggggccggcagcaaggtgcacgaattccagacgctgtccccggagggatctggcaacttggcggtgattggcggcgtggctgtcggtgtggtcctgcttctggtgctggcaggagttggcttctttatccaccgcaggaggaagaaccagcgtgcccgccagtccccggaggacgtttacttctccaagtcagaacaactgaagcccctgaagacatacgtggacccccacacatatgaggaccccaaccaggctgtgttgaagttcactaccgagatccatccatcctgtgtcactcggcagaaggtgatcggagcaggagagtttggggaggtgtacaagggcatgctgaagacatcctcggggaagaaggaggtgccggtggccatcaagacgctgaaagccggctacacagagaagcagcgagtggacttcctcggcgaggccggcatcatgggccagttcagccaccacaacatcatccgcctagagggcgtcatctccaaatacaagcccatgatgatcatcactgagtacatggagaatggggccctggacaagttccttcgggagaaggatggcgagttcagcgtgctgcagctggtgggcatgctgcggggcatcgcagctggcatgaagtacctggccaacatgaactatgtgcaccgtgacctggctgcccgcaacatcctcgtcaacagcaacctggtctgcaaggtgtctgactttggcctgtcccgcgtgctggaggacgaccccgaggccacctacaccaccagtggcggcaagatccccatccgctggaccgccccggaggccatttcctaccggaagttcacctctgccagcgacgtgtggagctttggcattgtcatgtgggaggtgatgacctatggcgagcggccctactgggagttgtccaaccacgaggtgatgaaagccatcaatgatggcttccggctccccacacccatggactgcccctccgccatctaccagctcatgatgcagtgctggcagcaggagcgtgcccgccgccccaagttcgctgacatcgtcagcatcctggacaagctcattcgtgcccctgactccctcaagaccctggctgactttgacccccgcgtgtctatccggctccccagcacgagcggctcggagggggtgcccttccgcacggtgtccgagtggctggagtccatcaagatgcagcagtatacggagcacttcatggcggccggctacactgccatcgagaaggtggtgcagatgaccaacgacgacatcaagaggattggggtgcggctgcccggccaccagaagcgcatcgcctacagcctgctgggactcaaggaccaggtgaacactgtggggatccccatctgagcctcgacagggcctggagccccatcggccaagaatacttgaagaaacagagtggcctccctgctgtgccatgctgggccactggggactttatttatttctagttctttcctccccctgcaacttccgctgaggggtctcggatgacaccctggcctgaactgaggagatgaccagggatgctgggctgggccctctttccctgcgagacgcacacagctgagcacttagcaggcaccgccacgtcccagcatccctggagcaggagccccgccacagccttcggacagacatataggatattcccaagccgaccttccctccgccttctcccacatgaggccatctcaggagatggagggcttggcccagcgccaagtaaacagggtacctcaagccccatttcctcacactaagagggcagactgtgaacttgactgggtgagacccaaagcggtccctgtccctctagtgccttctttagaccctcgggccccatcctcatccctgactggccaaacccttgctttcctgggcctttgcaagatgcttggttgtgttgaggtttttaaatatatattttgtactttgtggagagaatgtgtgtgtgtggcagggggccccgccagggctggggacagagggtgtcaaacattcgtgagctggggactcagggaccggtgctgcaggagtgtcctgcccatgccccagtcggccccatctctcatccttttggataagtttctattctgtcagtgttaaagattttgttttgttggacatttttttcgaatcttaatttattattttttttatatttattgttagaaaatgacttatttctgctctggaataaagttgcagatgattcaaaccgaaaaaaaaaaaaaaaaaa

SEQ ID NO: 230 - DNA, 5826 bp, Homo sapiens
  ref <308>: DATABASE ACCESSION NUMBER: GenBank No. NM005233
  ref <309>: DATABASE ENTRY DATE: 2004-11-16
cccgctctgcttcagcgcacgctgaagacggcactaggacccagggaagtccccgagcggggttcgcggaaaggcagccagactcctccttatctccagtgtcaaacttgacatcagcctgcgagcggagcatggtaacttctccagcaatcagagcgctccccctcacatcagtggcatgcttcatggagatatgctcctctcactgccctctgcaccagcaacatggattgtcagctctccatcctcctccttctcagctgctctgttctcgacagcttcggggaactgattccgcagccttccaatgaagtcaatctactggattcaaaaacaattcaaggggagctgggctggatctcttatccatcacatgggtgggaagagatcagtggtgtggatgaacattacacacccatcaggacttaccaggtgtgcaatgtcatggaccacagtcaaaacaattggctgagaacaaactgggtccccaggaactcagctcagaagatttatgtggagctcaagttcactctacgagactgcaatagcattccattggttttaggaacttgcaaggagacattcaacctgtactacatggagtctgatgatgatcatggggtgaaatttcgagagcatcagtttacaaagattgacaccattgcagctgatgaaagtttcactcaaatggatcttggggaccgtattctgaagctcaacactgagattagagaagtaggtcctgtcaacaagaagggattttatttggcatttcaagatgttggtgcttgtgttgccttggtgtctgtgagagtatacttcaaaaagtgcccatttacagtgaagaatctggctatgtttccagacacggtacccatggactcccagtccctggtggaggttagagggtcttgtgtcaacaattctaaggaggaagatcctccaaggatgtactgcagtacagaaggcgaatggcttgtacccattggcaagtgttcctgcaatgctggctatgaagaaagaggttttatgtgccaagcttgtcgaccaggtttctacaaggcattggatggtaatatgaagtgtgctaagtgcccgcctcacagttctactcaggaagatggttcaatgaactgcaggtgtgagaataattacttccgggcagacaaagaccctccatccatggcttgtacccgacctccatcttcaccaagaaatgttatctctaatataaacgagacctcagttatcctggactggagttggcccctggacacaggaggccggaaagatgttaccttcaacatcatatgtaaaaaatgtgggtggaatataaaacagtgtgagccatgcagcccaaatgtccgcttcctccctcgacagtttggactcaccaacaccacggtgacagtgacagaccttctggcacatactaactacacctttgagattgatgccgttaatggggtgtcagagctgagctccccaccaagacagtttgctgcggtcagcatcacaactaatcaggctgctccatcacctgtcctgacgattaagaaagatcggacctccagaaatagcatctctttgtcctggcaagaacctgaacatcctaatgggatcatattggactacgaggtcaaatactatgaaaagcaggaacaagaaacaagttataccattctgagggcaagaggcacaaatgttaccatcagtagcctcaagcctgacactatatacgtattccaaatccgagcccgaacagccgctggatatgggacgaacagccgcaagtttgagtttgaaactagtccagactctttctccatctctggtgaaagtagccaagtggtcatgatcgccatttcagcggcagtagcaattattctcctcactgttgtcatctatgttttgattgggaggttctgtggctataagtcaaaacatggggcagatgaaaaaagacttcattttggcaatgggcatttaaaacttccaggtctcaggacttatgttgacccacatacatatgaagaccctacccaagctgttcatgagtttgccaaggaattggatgccaccaacatatccattgataaagttgttggagcaggtgaatttggagaggtgtgcagtggtcgcttaaaacttccttcaaaaaaagagatttcagtggccattaagaccctgaaagttggctacacagaaaagcagaggagagacttcctgggagaagcaagcattatgggacagtttgaccaccccaatatcattcgactggaaggagttgttaccaaaagtaagccagttatgattgtcacagaatacatggagaatggttccttggatagtttcctacgtaaacacgatgcccagtttactgtcattcagctagtggggatgcttcgagggatagcatctggcatgaagtacctgtcagacatgggctatgttcaccgagacctcgctgctcggaacatcttgatcaacagtaacttggtgtgtaaggtttctgatttcggactttcgcgtgtcctggaggatgacccagaagctgcttatacaacaagaggagggaagatcccaatcaggtggacatcaccagaagctatagcctaccgcaagttcacgtcagccagcgatgtatggagttatgggattgttctctgggaggtgatgtcttatggagagagaccatactgggagatgtccaatcaggatgtaattaaagctgtagatgagggctatcgactgccaccccccatggactgcccagctgccttgtatcagctgatgctggactgctggcagaaagacaggaacaacagacccaagtttgagcagattgttagtattctggacaagcttatccggaatcccggcagcctgaagatcatcaccagtgcagccgcaaggccatcaaaccttcttctggaccaaagcaatgtggatatcactaccttccgcacaacaggtgactggcttaatggtgtctggacagcacactgcaaggaaatcttcacgggtgtggagtacagttcttgtgacacaatagccaagatttccacagatgacatgaaaaaggttggtgtcaccgtggttgggccacagaagaagatcatcagtagcattaaagctctagaaacgcaatcaaagaatggcccagttcccgtgtaaagcacgggacggaagtgcttctggacggaagtggtggctgtggaaggcgtagcatcatcctgcagacagacaataattctggagatactggtggaagttccaagtccaataagacactcaaatatgagtacaaatgccttaaaatggaattgaaaaactctttattttcccctatcatttattggatgggtgggtggggtatttttttgtaattgcttttttaaatattagttaatggattaaatttaattcttcagcgtaaaatggtgaagaactagcatatagccattgatcataaactgactatcataaaatcaaaacaagtgaaataacaaaatggacatggtggctttgtttaggtagagccacaaaagaaaagacttgtaatatttttatatacagaggaaatctgtaacaggtattttgtttcttttaaagcaagcaacacagaggaatttatacctcaaactatctggccatatttactaccttatcactgcattattctcttttatctgtttaaagcatatagagatgaagtttgtagttgttttaagtactacacatttttaaattgttagcttccttaagtatatcatgtaaagaaatgtcttaatttttgaaaaaagtacatatttattttcttttgaattgtttttattgttttctatttatgccttgatgatttaatatggatttgttacagccaagtgccaaatgctctctcaaattgtcagcaatttaactagacacagataataatgggtttctttcagattttttgaaccatccacttacatatatttttaaaaaatgaaatccttttcctgttcatacactaaccaaatctctcaaatctgttatcccaatcattgttgcctctccgtttattataaactgtatgctcacaacttagtgtaatataccagcttgtatgcaatggattttcaaccagataacatacctttcctgctctggtgcttagagactatcaactccctcctttagtgaaggagccgtgttagagcttccgagaatagctccactggagagaagtggaatcctatatagaatgctgcactaattgacaacacagcctataggccaatgcatgagtaaaaaaaaaaacaattactggctcactggctttgaaaagtcacttactattgttgctgaaacttgctgagctgtttatagagaatgatgataacagaacttttcctctgtatcactggtgtttaggtgaattaattaaacattgtgatcattagtaccaggtattattatctttaagagtcttccacttcaatgcacatggtgcagttttggtgtgtaacttagaaggattgaacttctttgaatttactggacataacattttcagaatagttggtcatctagcaaccgcctcaaaatgtgtaagcaggagagaaatttctcatcacagggatttagacttactattacataaaggctaactatgagcttgctcattaattttgaaaagatgtacctggtggatatctagctagtaatatattctgaagcaacattttagctctattgatactctttctaatgctgatatgatcttgagtataagaaatgcatatgtcactagaatggataaaataatgctgcaaacttaatgttcttatgcaaaatggaacgctaatgaaacacagcttacaatcgcaaatcaaaactcacaagtgctcatctgttgtagatttagtgtaataagacttagattgtgctccttcggatatgattgtttctcaaatcttggcaatattccttagtcaaatcaggctactagaattctgtattggatatataagagcatgaaatttttaaaaatacacttgtgattataaaattaatcacaaatttcacttatacctgctatcagcagctagaaaacattttttttttaaatcaagtattttgtgtttggaatgttagaatgagatctgaatgtggtttcaatctaattttttcccagactactattttcttttttaggtactattctgagcatactcaacaaaacccatgcatttcataaactaatagaagttgaggattgttgaatctatttcacttattttggctgtggtttccatctgaaagtagaggttgtatacaccatatactgttcttcattttattaatatttttctccttgacctctcataaatttactttacacaattcttaccctgtacatatgtaaacataagtgtacgattcttaaccatggagtagaggtactagaatgcttacggccatctctttgtacaggaactgcattgactttcagtaaacataaagccacaactcctacatgatgttatgtaccatatgatctgttttgtatcttaaatttgatttacatatattatttatttctggtaactcactcagtttatgctgtgctaaatatcaatcaagccatgtataaatgtgatatgattggcaatatgtgtttactttaaacttgtcttttcaaaatattactcagtttatgttgtacaatgtagatggcctcttactaatgtaaaatgatttgtagtggaaacatttatatttttataataaacataatgaaaatattttttacagattggaaaaaaaaaaaaaaaaaaa

SEQ ID NO: 231 - DNA, 6364 bp, Homo sapiens
  ref <308>: DATABASE ACCESSION NUMBER: GenBank No. NM004438
  ref <309>: DATABASE ENTRY DATE: 2004-11-16
ctgggatagaagcggcaggagcagcgttggcaccggcgaaccatggctgggattttctatttcgccctattttcgtgtctcttcgggatttgcgacgctgtcacaggttccagggtataccccgcgaatgaagttaccttattggattccagatctgttcagggagaacttgggtggatagcaagccctctggaaggagggtgggaggaagtgagtatcatggatgaaaaaaatacaccaatccgaacctaccaagtgtgcaatgtgatggaacccagccagaataactggctacgaactgattggatcacccgagaaggggctcagagggtgtatattgagattaaattcaccttgagggactgcaatagtcttccgggcgtcatggggacttgcaaggagacgtttaacctgtactactatgaatcagacaacgacaaagagcgtttcatcagagagaaccagtttgtcaaaattgacaccattgctgctgatgagagcttcacccaagtggacattggtgacagaatcatgaagctgaacaccgagatccgggatgtagggccattaagcaaaaaggggttttacctggcttttcaggatgtgggggcctgcatcgccctggtatcagtccgtgtgttctataaaaagtgtccactcacagtccgcaatctggcccagtttcctgacaccatcacaggggctgatacgtcttccctggtggaagttcgaggctcctgtgtcaacaactcagaagagaaagatgtgccaaaaatgtactgtggggcagatggtgaatggctggtacccattggcaactgcctatgcaacgctgggcatgaggagcggagcggagaatgccaagcttgcaaaattggatattacaaggctctctccacggatgccacctgtgccaagtgcccaccccacagctactctgtctgggaaggagccacctcgtgcacctgtgaccgaggctttttcagagctgacaacgatgctgcctctatgccctgcacccgtccaccatctgctcccctgaacttgatttcaaatgtcaacgagacatctgtgaacttggaatggagtagccctcagaatacaggtggccgccaggacatttcctataatgtggtatgcaagaaatgtggagctggtgaccccagcaagtgccgaccctgtggaagtggggtccactacaccccacagcagaatggcttgaagaccaccaaagtctccatcactgacctcctagctcataccaattacacctttgaaatctgggctgtgaatggagtgtccaaatataaccctaacccagaccaatcagtttctgtcactgtgaccaccaaccaagcagcaccatcatccattgctttggtccaggctaaagaagtcacaagatacagtgtggcactggcttggctggaaccagatcggcccaatggggtaatcctggaatatgaagtcaagtattatgagaaggatcagaatgagcgaagctatcgtatagttcggacagctgccaggaacacagatatcaaaggcctgaaccctctcacttcctatgttttccacgtgcgagccaggacagcagctggctatggagacttcagtgagcccttggaggttacaaccaacacagtgccttcccggatcattggagatggggctaactccacagtccttctggtctctgtctcgggcagtgtggtgctggtggtaattctcattgcagcttttgtcatcagccggagacggagtaaatacagtaaagccaaacaagaagcggatgaagagaaacatttgaatcaaggtgtaagaacatatgtggacccctttacgtacgaagatcccaaccaagcagtgcgagagtttgccaaagaaattgacgcatcctgcattaagattgaaaaagttataggagttggtgaatttggtgaggtatgcagtgggcgtctcaaagtgcctggcaagagagagatctgtgtggctatcaagactctgaaagctggttatacagacaaacagaggagagacttcctgagtgaggccagcatcatgggacagtttgaccatccgaacatcattcacttggaaggcgtggtcactaaatgtaaaccagtaatgatcataacagagtacatggagaatggctccttggatgcattcctcaggaaaaatgatggcagatttacagtcattcagctggtgggcatgcttcgtggcattgggtctgggatgaagtatttatctgatatgagctatgtgcatcgtgatctggccgcacggaacatcctggtgaacagcaacttggtctgcaaagtgtctgattttggcatgtcccgagtgcttgaggatgatccggaagcagcttacaccaccaggggtggcaagattcctatccggtggactgcgccagaagcaattgcctatcgtaaattcacatcagcaagtgatgtatggagctatggaatcgttatgtgggaagtgatgtcgtacggggagaggccctattgggatatgtccaatcaagatgtgattaaagccattgaggaaggctatcggttaccccctccaatggactgccccattgcgctccaccagctgatgctagactgctggcagaaggagaggagcgacaggcctaaatttgggcagattgtcaacatgttggacaaactcatccgcaaccccaacagcttgaagaggacagggacggagagctccagacctaacactgccttgttggatccaagctcccctgaattctctgctgtggtatcagtgggcgattggctccaggccattaaaatggaccggtataaggataacttcacagctgctggttataccacactagaggctgtggtgcacgtgaaccaggaggacctggcaagaattggtatcacagccatcacgcaccagaataagattttgagcagtgtccaggcaatgcgaacccaaatgcagcagatgcacggcagaatggttcccgtctgagccagtactgaataaactcaaaactcttgaaattagtttacctcatccatgcactttaattgaagaactgcactttttttacttcgtcttcgccctctgaaattaaagaaatgaaaaaaaaaaacaatatctgcagcgttgcttggtgcacagattgctgaaactgtggggcttacagaaatgactgccggtcatttgaatgagacctggaacaaatcgtttctcagaagtacttttctgttcatcaccagtctgtaaaatacatgtacctatagaaatagaacactgcctctgagttttgatgctgtatttgctgccagacactgagcttctgagacatccctgattctctctccatttggaattacaaccattgtattttgtttgtggcataaattacagtcatctgtctttcactggaatgaagaccatgcctaggaacattttttaaggactcagctgtggcttttagggcttggttcataccatgggggaaaaaaaagtcctaggagaaagcgacgtggctcattagtgttgcctcttcagtgctcaagccgcctggtggattcctatgacacagggggcctggaaagaaagggaaagtggatttaaaatatatatatacgtaacccaagccccataacccctaactggacaaatgaggtctgtttctttgggcctgaggctgtgccatataaagtcttattttgggactttacaaacttgtcctaactatcttgtggatagtgggctgtgacaatctggaatagagaacgttcacacttcgctcctttaaagaagcgaccccagatctgcaagggagtagattctgctatcttggcctcacagcccttcctgttgattacaaagcccgtggaagaaaacagaacacaccctcctcagttccgtctaaatgtgtttcttctgcttcaattacaccagttctggggcaaagacactgatgaaacaacacccatacctgaaaagaataaatgtgtgactttcaaatcccctttcgcagtgaaagaaacagcaaacacttaagattcagcatctgttctccagttgcactgaggaatgcactgtctcgcagcaccagctctgcagagcccttgccccagactctttgcggttttatttatatgtatttccatatttcattcctgtgtgtcactgctgcattggtgtggcagcaagtgaccaaatgctacaggtcttactatggacaccaggtcaggtgcaaccacacaaaacaaagccagttccatgagctgcctatgatatgcattgcggaagtaacattttacccagggtgtgccattgcagtgatataaatatatttttttcttagactaaatatgagctgactatctcttttgatgtgtgtacataggtgtgagtgtgtgtgtatgcgtgcctgtctgtgtgcgggtgtgtgtatgtgcatagcctcatgcttaggactacccatgaatgttgtggaatgctacacctggagagttctggttttccaccagtttcaagatgaagaactacatgatacagtggacctggagaccatccccttggaaagacaacccagagatgttcagcatcctgtatctacacgcatcctgtatctacacgtgtattttgtagctgtcacactaaccttaataagaattctacagctttggacagaggcattttcaccttaatggtgaagtaatttaaaatataaatccattcaggtgacaacccatcatcaaaattacaaattttctgattgaactcatctgaatcatcagttccttgatggagagagagaaggagatggaatgtgtctggtaaccccaaatggagtacaagtagcctttgttttcctgcataaatggacttgttgaatgcgaacgaatatatgcaattcatatacttttggagatgaacgtagatatgtgtgtcagctttgagatggtgtgtcctggattaatactttgtctcccaatatcacagaaaaatacatgccagtgactcttgaggttaaggtagttgggatgaaatggcctcaggcaatttcacattccctaattacctggaaagttctacagtaattaatatgcagctaactcctgttgccctcacaagagcatcagccttctagaatcggagctccggagtgtgaagattcagtattgatatgatatgtataccaaactccagccaacttactgccatttttcataatctgagtggctgccttgcttatcctaagctgtggttgcagaaaccgtggccatttatataagctataacatcaaatcagggaaaaatgaggaaaaaaaatagattctgaaccatttattgttgaataagtagagaaaatcatcaataaatatttattacattctgacagggtgtgtggcattgtgttctatgccagagtgacaaagttgattcacccctttttggggaccttaatatattttttaagggatgtgcctatgcattgatgcctgaaaaatatgtataaagaaatgaggttgactcttctgagcagttcatcttttccagaggtaagggtaggaggccaacttcagggtctgggtctgagcccgtgggcaagccctggccgagtgagctccaatgctaactcatgtgccgatctctagagcagtgggaaactaccccgctgcaccaaatcaagtagcttcaccttgtgtatgcaggccccaagttattttttagcaatcttacgagtgaaatgttctggtgggttgaaaaacgttcttattttaaagaaaggttgtgctcgctacactgctggtgtgtgcattctgagacctcttgtattcaatctgtgaaggatatgtgtattaatccgtacacccgtatagcctcaatatttgtctgaagacacttaaattctgacccataaaggaaagttctagaagcaatattttcacttatttaacattctccaaacaacatcaagcattgatacacactgaagagtgcgtttattttttgtatcactctaagtatgttggaatatgcaaggactgtggttcaaattagaatgtataaggcatattataatttagttcatactgaataagaaattaacagaacattgttcggttcacacgttccaaactttgagtgatttctggagttagacatagattttctattttgttttaatttgtcaaggtatttttcttcccttcatgaactttaggtacacataacttatgtcatttatttatggtcttttatacctagtttgtaaaattgtaaaatagcaaactaaatgcaaagagtttgcatttgaaaataataaagtagttgccgtatacaaccctgcaaaaaaaaaaaaaaaaaa

SEQ ID NO: 232 - DNA, 3162 bp, Homo sapiens
  ref <308>: DATABASE ACCESSION NUMBER: GenBank No. L36644
  ref <309>: DATABASE ENTRY DATE: 1995-08-10
ccagcgtccctggccggctgctactctgcacctcgacgggctcccctctggacgtgccttctcctgtgcgccgcactccggaccctcctggccagccccagcaacgaagtgaatttattggattcacgcactgtcatgggggacctgggatggattgcttttccaaaaaatgggtgggaagagattggtgaagtggatgaaaattatgcccctatccacacataccaagtatgcaaagtgatggaacagaatcagaataactggcttttgaccagttggatctccaatgaaggtgcttccagaatcttcatagaactcaaatttaccctgcgggactgcaacagccttcctggaggactggggacctgtaaggaaacctttaatatgtattactttgagtcagatgatcagaatgggagaaacatcaaggaaaaccaatacatcaaaattgataccattgctgccgatgaaagctttacagaacttgatcttggtgaccgtgttatgaaactgaatacagaggtcagagatgtaggacctctaagcaaaaagggattttatcttgcttttcaagatgttggtgcttgcattgctctggtttctgtgcgtgtatactataaaaaatgcccttctgtggtacgacacttggctgtcttccctgacaccatcactggagctgattcttcccaattgctcgaagtgtcaggctcctgtgtcaaccattctgtgaccgatgaacctcccaaaatgcactgcagcgccgaaggggagtggctggtgcccatcgggaaatgcatgtgcaaggcaggatatgaagagaaaaatggcacctgtcaagtgtgcagacctgggttcttcaaagcctcacctcacatccagagctgcggcaaatgtccacctcacagttatacccatgaggaagcttcaacctcttgtgtctgtgaaaaggattatttcaggagagagtctgatccacccacaatggcatgcacaagacccccctctgctcctcggaatgccatctcaaatgttaatgaaactagtgtctttctggaatggattccgcctgctgacactggtggaaggaaagacgtgtcatattatattgcatgcaagaagtgcaactcccatgcaggtgtgtgtgaggagtgtggcggtcatgtcaggtaccttccccggcaaagcggcctgaaaaacacctctgtcatgatggtggatctactcgctcacacaaactatacctttgagattgaggcagtgaatggagtgtccgacttgagcccaggagcccggcagtatgtgtctgtaaatgtaaccacaaatcaagcagctccatctccagtcaccaatgtgaaaaaagggaaaattgcaaaaaacagcatctctttgtcttggcaagaaccagatcgtcccaatggaatcatcctagagtatgaaatcaagcattttgaaaaggaccaagagaccagctacacgattatcaaatctaaagagacaactattactgcagagggcttgaaaccagcttcagtttatgtcttccaaattcgagcacgtacagcagcaggctatggtgtcttcagtcgaagatttgagtttgaaaccaccccagtgtttgcagcatccagcgatcaaagccagattcctgtaattgctgtgtctgtgacagtaggagtcattttgttggcagtggttatcggcgtcctcctcagtggaaggcggtgtggctacagcaaagcaaaacaagatccagaagaggaaaagatgcattttcataatgggcacattaaactgccaggagtaagaacttacattgatccacatacctatgaggatcccaatcaagctgtccacgaatttgccaaggagatagaagcatcatgtatcaccattgagagagttattggagcaggtgaatttggtgaagtttgtagtggacgtttgaaactaccaggaaaaagagaattacctgtggctatcaaaacccttaaagtaggctatactgaaaagcaacgcagagatttcctaggtgaagcaagtatcatgggacagtttgatcatcctaacatcatccatttagaaggtgtggtgaccaaaagtaaaccagtgatgatcgtgacagagtatatggagaatggctctttagatacatttttgaagaaaaacgatgggcagttcactgtgattcagcttgttggcatgctgagaggtatctctgcaggaatgaagtacctttctgacatgggctatgtgcatagagatcttgctgccagaaacatcttaatcaacagtaaccttgtgtgcaaagtgtctgactttggactttcccgggtactggaagatgatcccgaggcagcctacaccacaaggggaggaaaaattccaatcagatggactgccccagaagcaatagctttccgaaagtttacttctgccagtgatgtctggagttatggaatagtaatgtgggaagttgtgtcttatggagagagaccctactgggagatgaccaatcaagatgtgattaaagcggtagaggaaggctatcgtctgccaagccccatggattgtcctgctgctctctatcagttaatgctggattgctggcagaaagagcgaaatagcaggcccaagtttgatgaaatagtcaacatgttggacaagctgatacgtaacccaagtagtctgaagacgctggttaatgcatcctgcagagtatctaatttattggcagaacatagcccactaggatctggggcctacagatcagtaggtgaatggctagaggcaatcaagatgggccggtatacagagattttcatggaaaatggatacagttcaatggacgctgtggctcaggtgaccttggaggatttgagacggcttggagtgactcttgtcggtcaccagaagaagatcatgaacagccttcaagaaatgaaggtgcagctggtaaacggaatggtgccattgtaacttcatgtaaatgtcgcttcttcaagtgaatgattctgcactttgtaaacagcactgagatttattttaacaaaaaaagggggaaaagggaaaacagtgatttctaaaccttagaaaacatttgcctcagccacagaatttgtaatcatggttttactgaagtatccagttcttagtccttagtct

SEQ ID NO: 233 - DNA, 1619 bp, Homo sapiens
  ref <308>: DATABASE ACCESSION NUMBER: GenBank No. AL133666
  ref <309>: DATABASE ENTRY DATE: 2005-01-20
aggaaagctaagacaaacaaaactacaatggaagaagaaaacgtcctcaactagacatctgccaaaaatatcatccagaatgccctggcaagttcacttccatttagtgaagtgagataatttggcaattcacgcaagagactgagaaccaagcctcaagccctgcctctgattctgcaggtatggaacatgagcagctgacctactcttccacaaggtccaaagcccccagtgtcatcatcacaggtcttaagccagccaccaaatatgtatttcacatccgagtgagaactgcgacaggatacagtggctacagtcagaaatttgaatttgaaacaggagatgaaagactctccatttcaagtgacaaaactgtactggcttaatgaaaagtgggactttattgcctcagcttctgacatggcagcagaacaaggacagattctcgtgatagccaccgccgctgttggcggattcactctcctcgtcatcctcactttattcttcttgatcactgggagatgtcagtggtacataaaagccaagatgaagtcagaagagaagagaagaaaccacttacagaatgggcatttgcgcttcccgggaattaaaacttacattgatccagatacatatgaagacccatccctagcagtccatgaatttgcaaaggagattgatccctcaagaattcgtattgagagagtcattggggcaggtgaatttggagaagtctgtagtgggcgtttgaagacaccagggaaaagagagatcccagttgccattaaaactttgaaaggtggccacatggatcggcaaagaagagattttctaagagaagctagtatcatgggccagtttgaccatccaaacatcattcgcctagaaggggttgtcaccaaaagatccttcccggccattggggtggaggcgttttgccccagcttcctgagggcagggtttttaaatagcatccaggccccgcatccagtgccagggggaggatctttgccccccaggattcctgctggcagaccagtaatgattgtggtggaatatatggagaatggatccctagactcctttttgcggaagcatgatggccacttcacagtcatccagttggtcggaatgctccgaggcattgcatcaggcatgaagtatctttctgatatgggttatgttcatcgagacctagcggctcggaatatactggtcaatagcaacttagtatgcaaagtttctgattttggtctctccagagtgctggaagatgatccagaagctgcttatacaacaactgacctcttccaaactctaacacttaacctctgctattctgcataaattctgagaaaagccaaattttctgtcggtctaagaagacatagcctacacccaactggagataattataaaaaataatgaagcagcatgaggggaaggtatttaatgtgtattttaaagttgggagagattctccttcacctaatttaggtgtttgtgaattggcttgactttttgaagttaatttttaagccttgaacatgtccaactttaagaactttaagaataaatattttaacacaagtgaaaaaaaaaaaaaaaaaaaaaaaagg

SEQ ID NO: 234 - DNA, 4996 bp, Homo sapiens
  ref <308>: DATABASE ACCESSION NUMBER: GenBank No. NM004440
  ref <309>: DATABASE ENTRY DATE: 2005-01-26
gcgccggggtgtgcgcccggccgggtgtgcggagagcgagggagcgcgctccctcccgacgcgcgggccgcagcggccaagcccgagggtgcgtggcgcccccgcccgcccggcccggcccggccatggcccccgcccggggccgcctgccccctgcgctctgggtcgtcacggccgcggcggcggcggccacctgcgtgtccgcggcgcgcggcgaagtgaatttgctggacacgtcgaccatccacggggactggggctggctcacgtatccggctcatgggtgggactccatcaacgaggtggacgagtccttccagcccatccacacgtaccaggtttgcaacgtcatgagccccaaccagaacaactggctgcgcacgagctgggtcccccgagacggcgcccggcgcgtctatgctgagatcaagtttaccctgcgcgactgcaacagcatgcctggtgtgctgggcacctgcaaggagaccttcaacctctactacctggagtcggaccgcgacctgggggccagcacacaagaaagccagttcctcaaaatcgacaccattgcggccgacgagagcttcacaggtgccgaccttggtgtgcggcgtctcaagctcaacacggaggtgcgcagtgtgggtcccctcagcaagcgcggcttctacctggccttccaggacataggtgcctgcctggccatcctctctctccgcatctactataagaagtgccctgccatggtgcgcaatctggctgccttctcggaggcagtgacgggggccgactcgtcctcactggtggaggtgaggggccagtgcgtgcggcactcagaggagcgggacacacccaagatgtactgcagcgcggagggcgagtggctcgtgcccatcggcaaatgcgtgtgcagtgccggctacgaggagcggcgggatgcctgtgtggcctgtgagctgggcttctacaagtcagcccctggggaccagctgtgtgcccgctgccctccccacagccactccgcagctccagccgcccaagcctgccactgtgacctcagctactaccgtgcagccctggacccgccgtcctcagcctgcacccggccaccctcggcaccagtgaacctgatctccagtgtgaatgggacatcagtgactctggagtgggcccctcccctggacccaggtggccgcagtgacatcacctacaatgccgtgtgccgccgctgcccctgggcactgagccgctgcgaggcatgtgggagcggcacccgctttgtgccccagcagacaagcctggtgcaggccagcctgctggtggccaacctgctggcccacatgaactactccttctggatcgaggccgtcaatggcgtgtccgacctgagccccgagccccgccgggccgctgtggtcaacatcaccacgaaccaggcagccccgtcccaggtggtggtgatccgtcaagagcgggcggggcagaccagcgtctcgctgctgtggcaggagcccgagcagccgaacggcatcatcctggagtatgagatcaagtactacgagaaggacaaggagatgcagagctactccaccctcaaggccgtcaccaccagagccaccgtctccggcctcaagccgggcacccgctacgtgttccaggtccgagcccgcacctcagcaggctgtggccgcttcagccaggccatggaggtggagaccgggaaaccccggccccgctatgacaccaggaccattgtctggatctgcctgacgctcatcacgggcctggtggtgcttctgctcctgctcatctgcaagaagaggcactgtggctacagcaaggccttccaggactcggacgaggagaagatgcactatcagaatggacaggcacccccacctgtcttcctgcctctgcatcaccccccgggaaagctcccagagccccagttctatgcggaaccccacacctacgaggagccaggccgggcgggccgcagtttcactcgggagatcgaggcctctaggatccacatcgagaaaatcatcggctctggagactccggggaagtctgctacgggaggctgcgggtgccagggcagcgggatgtgcccgtggccatcaaggccctcaaagccggctacacggagagacagaggcgggacttcctgagcgaggcgtccatcatggggcaattcgaccatcccaacatcatccgcctcgagggtgtcgtcacccgtggccgcctggcaatgattgtgactgagtacatggagaacggctctctggacaccttcctgaggacccacgacgggcagttcaccatcatgcagctggtgggcatgctgagaggagtgggtgccggcatgcgctacctctcagacctgggctatgtccaccgagacctggccgcccgcaacgtcctggttgacagcaacctggtctgcaaggtgtctgacttcgggctctcacgggtgctggaggacgacccggatgctgcctacaccaccacgggcgggaagatccccatccgctggacggccccagaggccatcgccttccgcaccttctcctcggccagcgacgtgtggagcttcggcgtggtcatgtgggaggtgctggcctatggggagcggccctactggaacatgaccaaccgggatgtcatcagctctgtggaggaggggtaccgcctgcccgcacccatgggctgcccccacgccctgcaccagctcatgctcgactgttggcacaaggaccgggcgcagcggcctcgcttctcccagattgtcagtgtcctcgatgcgctcatccgcagccctgagagtctcagggccaccgccacagtcagcaggtgcccaccccctgccttcgtccggagctgctttgacctccgagggggcagcggtggcggtgggggcctcaccgtgggggactggctggactccatccgcatgggccggtaccgagaccacttcgctgcgggcggatactcctctctgggcatggtgctacgcatgaacgcccaggacgtgcgcgccctgggcatcaccctcatgggccaccagaagaagatcctgggcagcattcagaccatgcgggcccagctgaccagcacccaggggccccgccggcacctctgatgtacagccagcagggcccaggcagccaccaagcccaccccaggtcatgccagcggcagaggacgtgaggggctggcagcaggcagggcggccccaggcctctgccctcctctcaggtgctggaggagctgaaggcttcgccacaggacctggagttatcaggggtcaggcgcctgggaaggggcctttggtggccaccctggtgaggacacctgtcccccagggcaggcaccttctcttttccagagcctggggcctccacgtcacagagtccaacagggacatcactcgcctgcctctgtgtgcgtgcatgtgtgtgtgtggtggggggtgttctcacaaggtcatgggatctcatgtgaacagtgtgtgatcaagtgtgtccaccccttcgggtctcagcatggacgtgtgcatgttatgagcgtgtgcttatccgttaaggctggaggcacatgtgggtgatggtggatgatgtgtcatgaatgaggaggtgtgtgagcagggaactcagtgtgacaccgccaggtccagcacccatgggggcgggggagaggctcacccctacgtccccccacacctggaggctggagccaggggccacttctgaactgcaccagcaccaggcccaccctcgtctctgcctgggtgagcccaccccggctgtatctcaggtctgggtcctccctctagccgaggaggccacctgcagcctccacccggctctcaccgctgcttcaacaggaaaacagggttcccggtcagtccggctggccgccttcatggaggcatcatggcagagcacatgagatgtcctcagctgggcttggctgcctggccagggccgggggctcagcagcctcctctagcctctgatgccttccctccacggcccaggtctcctcactcaaagtcccttcgccaacctttcaatgcccagccctgacacctgccctttgtcccccaggcctaggatcagggaccagaggatcctatcttctcagcacccagcccaccccttcctgtagcatatggggagactaaggcctggagagaggggtgatgccccgtcccaggttgcactgcaaccaagtgtcagagtcggggctccggcctcctgccaaggctcttgtccccatacaccatcccacaagggcgctgggggtggaagtgccctggaagcccctcccctctcacactgacctccccccttacggcccaccagggtatgtaaatatctcttttctaccatgtcagaatattttttcctcactcctgacaatgcaaaaatggtcttcaaagcacataaaaagcacccagggtgagaaagccccatcccgggggccgttggcaggcagggaagcaggaaccccaccgtgtgccccctgccagccccagagggagtggcgagcccagctgcccagccctgccccccctccccatagccagcacagctatcccgcggggacaccagcactgagccccctctccctcctgcaataattcggggagtctcagccccatccaggtgccgcggccagctctctacacctctatatattatattactatatagccgagctgttcttccttcctatggaagtcggaaacatggtcagaacacgatctgggggggggatcctgtcttcctccccaccccaccccactcttacccaatttctgggctctggatcctcacagtcatggaggcaccgtgggcctggcacttgcaaaagtgtggcccctcactctagtgtgtggtccctctcagggtcctggggatctgcctctctgtggtctccatcctgactcttgaacttacccacaataagaataaattctgcctcatcttt

SEQ ID NO: 235 - DNA, 5229 bp, Homo sapiens
  ref <308>: DATABASE ACCESSION NUMBER: GenBank No. NM020526
  ref <309>: DATABASE ENTRY DATE: 2004-11-16
gcagtcggagacttgcaggcagcaaacacggtgcgagcgaacaggagtgggggggaaattaaaaaaagctaaacgtggagcagccgatcggggaccgagaaggggaatcgatgcaaggagcacaataaaacaaaagctacttcggaacaaacagcatttaaaaatccacgactcaagataactgaaacctaaaataaaacctgctcatgcaccatggtttttcaaactcggtacccttcatggattattttatgctacatctggctgctccgctttgcacacacaggggaggcgcaggctgcgaaggaagtactactgctggattctaaagcacaacaaacagagttggagtggatttcctctccacccaatgggtgggaagaaattagtggtttggatgagaactataccccgatacgaacataccaggtgtgccaagtcatggagcccaaccaaaacaactggctgcggactaactggatttccaaaggcaatgcacaaaggatttttgtagaattgaaattcaccctgagggattgtaacagtcttcctggagtactgggaacttgcaaggaaacatttaatttgtactattatgaaacagactatgacactggcaggaatataagagaaaacctctatgtaaaaatagacaccattgctgcagatgaaagttttacccaaggtgaccttggtgaaagaaagatgaagcttaacactgaggtgagagagattggacctttgtccaaaaagggattctatcttgcctttcaggatgtaggggcttgcatagctttggtttctgtcaaagtgtactacaagaagtgctggtccattattgagaacttagctatctttccagatacagtgactggttcagaattttcctctttagtcgaggttcgagggacatgtgtcagcagtgcagaggaagaagcggaaaacgcccccaggatgcactgcagtgcagaaggagaatggttagtgcccattggaaaatgtatctgcaaagcaggctaccagcaaaaaggagacacttgtgaaccctgtggccgtgggttctacaagtcttcctctcaagatcttcagtgctctcgttgtccaactcacagtttttctgataaagaaggctcctccagatgtgaatgtgaagatgggtattacagggctccatctgacccaccatacgttgcatgcacaaggcctccatctgcaccacagaacctcattttcaacatcaaccaaaccacagtaagtttggaatggagtcctcctgcagacaatgggggaagaaacgatgtgacctacagaatattgtgtaagcggtgcagttgggagcagggcgaatgtgttccctgtgggagtaacattggatacatgccccagcagactggattagaggataactatgtcactgtcatggacctgctagcccacgctaattatacttttgaagttgaagctgtaaatggagtttctgacttaagccgatcccagaggctctttgctgctgtcagtatcaccactggtcaagcagctccctcgcaagtgagcggagtaatgaaggagagagtactgcagcggagtgtcgagctttcctggcaggaaccagagcatcccaatggagtcatcacagaatatgaaatcaagtattacgagaaagatcaaagggaacggacctactcaacagtaaaaaccaagtctacttcagcctccattaataatctgaaaccaggaacagtgtatgttttccagattcgggcttttactgctgctggttatggaaattacagtcccagacttgatgttgctacactagaggaagctacaggtaaaatgtttgaagctacagctgtctccagtgaacagaatcctgttattatcattgctgtggttgctgtagctgggaccatcattttggtgttcatggtctttggcttcatcattgggagaaggcactgtggttatagcaaagctgaccaagaaggcgatgaagagctttactttcattttaaatttccaggcaccaaaacctacattgaccctgaaacctatgaggacccaaatagagctgtccatcaattcgccaaggagctagatgcctcctgtattaaaattgagcgtgtgattggtgcaggagaattcggtgaagtctgcagtggccgtttgaaacttccagggaaaagagatgttgcagtagccataaaaaccctgaaagttggttacacagaaaaacaaaggagagactttttgtgtgaagcaagcatcatggggcagtttgaccacccaaatgttgtccatttggaaggggttgttacaagagggaaaccagtcatgatagtaatagagttcatggaaaatggagccctagatgcatttctcaggaaacatgatgggcaatttacagtcattcagttagtaggaatgctgagaggaattgctgctggaatgagatatttggctgatatgggatatgttcacagggaccttgcagctcgcaatattcttgtcaacagcaatctcgtttgtaaagtgtcagattttggcctgtcccgagttatagaggatgatccagaagctgtctatacaactactggtggaaaaattccagtaaggtggacagcacccgaagccatccagtaccggaaattcacatcagccagtgatgtatggagctatggaatagtcatgtgggaagttatgtcttatggagaaagaccttattgggacatgtcaaatcaagatgttataaaagcaatagaagaaggttatcgtttaccagcacccatggactgcccagctggccttcaccagctaatgttggattgttggcaaaaggagcgtgctgaaaggccaaaatttgaacagatagttggaattctagacaaaatgattcgaaacccaaatagtctgaaaactcccctgggaacttgtagtaggccaataagccctcttctggatcaaaacactcctgatttcactaccttttgttcagttggagaatggctacaagctattaagatggaaagatataaagataatttcacggcagctggctacaattcccttgaatcagtagccaggatgactattgaggatgtgatgagtttagggatcacactggttggtcatcaaaagaaaatcatgagcagcattcagactatgagagcacaaatgctacatttacatggaactggcattcaagtgtgatatgcatttctcccttttaagggagattacagactgcaagagaacagtactggccttcagtatatgcatagaatgctgctagaagacaagtgatgtcctgggtccttccaacagtgaagagaagatttaagaagcacctatagacttgaactcctaagtgccaccagaatatataaaaagggaatttaggatccaccatcggtggccaggaaaatagcagtgacaataaacaaagtactacctgaaaaacatccaaacaccttgagctctctaacctcctttttgtcttatagactttttaaaatgtacataaagaatttaagaaagaatatatttgtcaaataaaatcatgatcttattgttaaaattaatgaaatattttccttaaatatgtgatttcagactattcctttttaaaatcatttgtgtttattcttcataaggactttgttttagaaagctgtttatagctttggacctttttagtgttaaatctgtaacattactacactgggtacctttgaaagaatctcaaatttcaaaagaaatagcatgattgaagatacatctctgttagaacattggtatcctttttgtgccattttattctgtttaatcagtgctgttttgatattgtttgctaattggcaggtagtcaagaaaatgcaagttgccaagagctctgatattttttaaaaagaatttttttgtaaagatcagacaacacactatcttttcaatgaaaaaagcaataatgatccatacatactataaggcacttttaacagattgtttatagagtgattttactagaaagaatttaataaactcgaagtttaggtttatgagtatataaacaaatgaggcacttcatctgaagaatgttggtgaaggcaagtctctgaaagcagaactatccagtgttatctaaaaattaatctgagcacatcaagattttttcattctcgtgacattaggaaatttaggataaatagttgacatatattttatatcctcttctgttgaatgcagtccaaacatgaaaggaaataattgttttatattataactctgaagcatgataaaggggcagttcacaattttcaccatttaaacacaaatttgctgcacagaatatcaccattgcagttcaaaacaaaacaaaacaaaaagtcttttgtttgtgaacactgatgcaagaaacttgttaaatgaaaggactctttaccctagaaggaagaggtgaaggatctggcttgtttttaaagctttatttattaaaccatattatttgattactgtgttagaatttcataagcaataattaaatgtgtctttatagatattgcaggaatgtatacatattgtgattaatgctttcaaaacttatgaaaatcatgaactaccccagaattgaactgttgtacttccaaagagaattgggctgtttataatgattttaatagagaaagatcccagggatcggtcataattggtcttgtttgataatgtgggcatccacaaacaaacaaacaaataacagaaacaaaatctgtaaatgttcctttgtaaaacttgtaaattttatttatactgtcttgttttgtacacacatttctctgtagtgggctctgaatacattgaaaatgcactatatttttctattttacttgcagagcatcacaaaagaacaggtattttcagtgctacataatgtgttttcccacatttaggaccaaagacggctatagaaaaactcaaatggattgcttcccaaacccctccccaccctttttttttggttttaaatcactgtacagtgttatttgatattttaatttattttttgattgactagaaaaatcattttaatttcactaaaatgttttttgtccctaaggaaaagtaatctgtaaaaataattttaattagcataatacagtcacctagacacttccatttgtaatctttgtaatagactgtaaatatatttttggaactataaaaaaaaaaaaaaaa

SEQ ID NO: 236 - DNA, 3949 bp, Homo sapiens
  ref <308>: DATABASE ACCESSION NUMBER: GenBank No. AF025304
  ref <309>: DATABASE ENTRY DATE: 2000-11-29
gaattccgccccgggaagcgcagccatggctctgcggaggctgggggccgcgctgctgctgctgccgctgctcgccgccgtggaagaaacgctaatggactccactacagcgactgctgagctgggctggatggtgcatcctccatcagggtgggaagaggtgagtggctacgatgagaacatgaacacgatccgcacgtaccaggtgtgcaacgtgtttgagtcaagccagaacaactggctacggaccaagtttatccggcgccgtggcgcccaccgcatccacgtggagatgaagttttcggtgcgtgactgcagcagcatccccagcgtgcctggctcctgcaaggagaccttcaacctctattactatgaggctgactttgactcggccaccaagaccttccccaactggatggagaatccatgggtgaaggtggataccattgcagccgacgagagcttctcccaggtggacctgggtggccgcgtcatgaaaatcaacaccgaggtgcggagcttcggacctgtgtcccgcagcggcttctacctggccttccaggactatggcggctgcatgtccctcatcgccgtgcgtgtcttctaccgcaagtgcccccgcatcatccagaatggcgccatcttccaggaaaccctgtcgggggctgagagcacatcgctggtggctgcccggggcagctgcatcgccaatgcggaagaggtggatgtacccatcaagctctactgtaacggggacggcgagtggctggtgcccatcgggcgctgcatgtgcaaagcaggcttcgaggccgttgagaatggcaccgtctgccgaggttgtccatctgggactttcaaggccaaccaaggggatgaggcctgtacccactgtcccatcaacagccggaccacttctgaaggggccaccaactgtgtctgccgcaatggctactacagagcagacctggaccccctggacatgccctgcacaaccatcccctccgcgccccaggctgtgatttccagtgtcaatgagacctccctcatgctggagtggacccctccccgcgactccggaggccgagaggacctcgtctacaacatcatctgcaagagctgtggctcgggccggggtgcctgcacccgctgcggggacaatgtacagtacgcaccacgccagctaggcctgaccgagccacgcatttacatcagtgacctgctggcccacacccagtacaccttcgagatccaggctgtgaacggcgttactgaccagagccccttctcgcctcagttcgcctctgtgaacatcaccaccaaccaggcagctccatcggcagtgtccatcatgcatcaggtgagccgcaccgtggacagcattaccctgtcgtggtcccagccagaccagcccaatggcgtgatcctggactatgagctgcagtactatgagaaggagctcagtgagtacaacgccacagccataaaaagccccaccaacacggtcaccgtgcagggcctcaaagccggcgccatctatgtcttccaggtgcgggcacgcaccgtggcaggctacgggcgctacagcggcaagatgtacttccagaccatgacagaagccgagtaccagacaagcatccaggagaagttgccactcatcatcggctcctcggccgctggcctggtcttcctcattgctgtggttgtcatcgccatcgtgtgtaacagacgggggtttgagcgtgctgactcggagtacacggacaagctgcaacactacaccagtggccacatgaccccaggcatgaagatctacatcgatcctttcacctacgaggaccccaacgaggcagtgcgggagtttgccaaggaaattgacatctcctgtgtcaaaattgagcaggtgatcggagcaggggagtttggcgaggtctgcagtggccacctgaagctgccaggcaagagagagatctttgtggccatcaagacgctcaagtcgggctacacggagaagcagcgccgggacttcctgagcgaagcctccatcatgggccagttcgaccatcccaacgtcatccacctggagggtgtcgtgaccaagagcacacctgtgatgatcatcaccgagttcatggagaatggctccctggactcctttctccggcaaaacgatgggcagttcacagtcatccagctggtgggcatgcttcggggcatcgcagctggcatgaagtacctggcagacatgaactatgttcaccgtgacctggctgcccgcaacatcctcgtcaacagcaacctggtctgcaaggtgtcggactttgggctctcacgctttctagaggacgatacctcagaccccacctacaccagtgccctgggcggaaagatccccatccgctggacagccccggaagccatccagtaccggaagttcacctcggccagtgatgtgtggagctacggcattgtcatgtgggaggtgatgtcctatggggagcggccctactgggacatgaccaaccaggatgtaatcaatgccattgagcaggactatcggctgccaccgcccatggactgcccgagcgccctgcaccaactcatgctggactgttggcagaaggaccgcaaccaccggcccaagttcggccaaattgtcaacacgctagacaagatgatccgcaatcccaacagcctcaaagccatggcgcccctctcctctggcatcaacctgccgctgctggaccgcacgatccccgactacaccagctttaacacggtggacgagtggctggaggccatcaagatggggcagtacaaggagagcttcgccaatgccggcttcacctcctttgacgtcgtgtctcagatgatgatggaggacattctccgggttggggtcactttggctggccaccagaaaaaaatcctgaacagtatccaggtgatgcgggcgcagatgaaccagattcagtctgtggagggccagccactcgccaggaggccacgggccacgggaagaaccaagcggtgccagccacgagacgtcaccaagaaaacatgcaactcaaacgacggaaaaaaaaagggaatgggaaaaaagaaaacagatcctgggagggggcgggaaatacaaggaatattttttaaagaggattctcataaggaaagcaatgactgttcttgcgggggataaaaaagggcttgggagattcatgcgatgtgtccaatcggagacaaaagcagtttctctccaactccctctgggaaggtgacctggccagagccaagaaacactttcagaaaaacaaatgtgaaggggagagacaggggccacccttggctcctgtccctgctgctcctctaggcctcactcaacaaccaagcgcctggaggacgggacagatggacagacagccaccctgagaacccctctgggaaaatctattcctgccaccactgggcaaacagaagaatttttctgtctttggagagtattttagaaactccaatgaaagacactgtttctcctgttggctcacagggctgaaaggggcttttgtcctcctgggtcagggagaacgcggggaccccagaaaggtcagccttcctgaggatgggcaacccccaggtctgcagctccaggtacatatcacgcgcacagcctggcagcctggccctcctggtgcccactcccgccagcccctgcctcgaggactgatactgcagtgactgccgtcagctccgactgccgctgagaagggttgatcctgcatctgggtttgtttacagcaattcctggactcgggggtattttggtcacagggtggttttggtttagggggtttgtttgttgggttgttttttgttttttggttttttttaatgacaatgaagtgacactttgacatttccaaaaaaaaaaaaaaaaaaaaaaaaaaaaaaaaaaaaa

SEQ ID NO: 237 - DNA, 4234 bp, Homo sapiens
  ref <308>: DATABASE ACCESSION NUMBER: GenBank No. NM004443
  ref <309>: DATABASE ENTRY DATE: 2004-11-16
cgtgagcggcgcagcaagatcccagctcggaccccggacggcgcgcgcccccgaagccccggatcccagtcgggcccgcagctgaccgccagattactgtgcatcccgaatcacgaccacctgcaccctcctgccccggcccgccccccaagtcctcaggcacccagctccccggcgccccggatcctcctggaccggtccgtccagattcccgcgggaccgacctgtccgcatccccaggaccgccgggctcggtgcaccgcctcggtcccggagccgcccgcctggattgcattccctcctctcctggatctcctgggacccgacgcgagcctgccccggagcccgccgagcgcaccctctctcgggtgcctgcagccccgccggcgcggcccggcccggcgcggcccggctcggctcctagagctgccacggccatggccagagcccgcccgccgccgccgccgtcgccgccgccggggcttctgccgctgctccctccgctgctgctgctgccgctgctgctgctgcccgccggctgccgggcgctggaagagaccctcatggacacaaaatgggtaacatctgagttggcgtggacatctcatccagaaagtgggtgggaagaggtgagtggctacgatgaggccatgaatcccatccgcacataccaggtgtgtaatgtgcgcgagtcaagccagaacaactggcttcgcacggggttcatctggcggcgggatgtgcagcgggtctacgtggagctcaagttcactgtgcgtgactgcaacagcatccccaacatccccggctcctgcaaggagaccttcaacctcttctactacgaggctgacagcgatgtggcctcagcctcctcccccttctggatggagaacccctacgtgaaagtggacaccattgcacccgatgagagcttctcgcggctggatgccggccgtgtcaacaccaaggtgcgcagctttgggccactttccaaggctggcttctacctggccttccaggaccagggcgcctgcatgtcgctcatctccgtgcgcgccttctacaagaagtgtgcatccaccaccgcaggcttcgcactcttccccgagaccctcactggggcggagcccacctcgctggtcattgctcctggcacctgcatccctaacgccgtggaggtgtcggtgccactcaagctctactgcaacggcgatggggagtggatggtgcctgtgggtgcctgcacctgtgccaccggccatgagccagctgccaaggagtcccagtgccgcccctgtccccctgggagctacaaggcgaagcagggagaggggccctgcctcccatgtccccccaacagccgtaccacctccccagccgccagcatctgcacctgccacaataacttctaccgtgcagactcggactctgcggacagtgcctgtaccaccgtgccatctccaccccgaggtgtgatctccaatgtgaatgaaacctcactgatcctcgagtggagtgagccccgggacctgggtggccgggatgacctcctgtacaatgtcatctgcaagaagtgccatggggctggaggggcctcagcctgctcacgctgtgatgacaacgtggagtttgtgcctcggcagctgggcctgacggagcgccgggtccacatcagccatctgctggcccacacgcgctacacctttgaggtgcaggcggtcaacggtgtctcgggcaagagccctctgccgcctcgttatgcggccgtgaatatcaccacaaaccaggctgccccgtctgaagtgcccacactacgcctgcacagcagctcaggcagcagcctcaccctatcctgggcacccccagagcggcccaacggagtcatcctggactacgagatgaagtactttgagaagagcgagggcatcgcctccacagtgaccagccagatgaactccgtgcagctggacgggcttcggcctgacgcccgctatgtggtccaggtccgtgcccgcacagtagctggctatgggcagtacagccgccctgccgagtttgagaccacaagtgagagaggctctggggcccagcagctccaggagcagcttcccctcatcgtgggctccgctacagctgggcttgtcttcgtggtggctgtcgtggtcatcgctatcgtctgcctcaggaagcagcgacacggctctgattcggagtacacggagaagctgcagcagtacattgctcctggaatgaaggtttatattgacccttttacctacgaggaccctaatgaggctgttcgggagtttgccaaggagatcgacgtgtcctgcgtcaagatcgaggaggtgatcggagctggggaatttggggaagtgtgccgtggtcgactgaaacagcctggccgccgagaggtgtttgtggccatcaagacgctgaaggtgggctacaccgagaggcagcggcgggacttcctaagcgaggcctccatcatgggtcagtttgatcaccccaatataatccggctcgagggcgtggtcaccaaaagtcggccagttatgatcctcactgagttcatggaaaactgcgccctggactccttcctccggctcaacgatgggcagttcacggtcatccagctggtgggcatgttgcggggcattgctgccggcatgaagtacctgtccgagatgaactatgtgcaccgcgacctggctgctcgcaacatccttgtcaacagcaacctggtctgcaaagtctcagactttggcctctcccgcttcctggaggatgacccctccgatcctacctacaccagttccctgggcgggaagatccccatccgctggactgccccagaggccatagcctatcggaagttcacttctgctagtgatgtctggagctacggaattgtcatgtgggaggtcatgagctatggagagcgaccctactgggacatgagcaaccaggatgtcatcaatgccgtggagcaggattaccggctgccaccacccatggactgtcccacagcactgcaccagctcatgctggactgctgggtgcgggaccggaacctcaggcccaaattctcccagattgtcaataccctggacaagctcatccgcaatgctgccagcctcaaggtcattgccagcgctcagtctggcatgtcacagcccctcctggaccgcacggtcccagattacacaaccttcacgacagttggtgattggctggatgccatcaagatggggcggtacaaggagagcttcgtcagtgcggggtttgcatcttttgacctggtggcccagatgacggcagaagacctgctccgtattggggtcaccctggccggccaccagaagaagatcctgagcagtatccaggacatgcggctgcagatgaaccagacgctgcctgtgcaggtctgacaccggctcccacggggaccctgaggaccgtgcagggatgccaagcagccggctggactttcggactcttggacttttggatgcctggccttaggctgtggcccagaagctggaagtttgggaaaggcccaagctgggacttctccaggcctgtgttccctccccaggaagtgcgccccaaacctcttcatattgaagatggattaggagagggggtgatgacccctccccaagcccctcagggcccagaccttcctgctctccagcaggggatccccacaacctcacacttgtctgttcttcagtgctggaggtcctggcagggtcaggctggggtaagccggggttccacagggcccagccctggcaggggtctggccccccaggtaggcggagagcagtccctccctcaggaactggaggaggggactccaggaatggggaaatgtgacaccaccatcctgaagccagcttgcacctccagtttgcacagggatttgttctgggggctgagggccctgtccccacccccgcccttggtgctgtcataaaagggcaggcaggggcaggctgaggagttgccctttgccccccagagactgactctcagagccagagatgggatgtgtgagtgtgtgtgtgtgtgtgtgtgtgtgcgcgcgcgcgcgcgtgtgtgtgtgcacgcactggcctgcacagagagcatgggtgagcgtgtaaaagcttggccctgtgccctacaatggggccagctgggccgacagcagaataaaggcaataagatgaaaaaaaaaaaaaaa

SEQ ID NO: 238 - DNA, 4369 bp, Homo sapiens
  ref <308>: DATABASE ACCESSION NUMBER: GenBank No. NM004444
  ref <309>: DATABASE ENTRY DATE: 2004-11-16
ttccagcgcagctcagcccctgcccggcccggcccgcccggctccgcgccgcagtctccctccctcccgctccgtccccgctcgggctcccaccatccccgcccgcgaggagagcactcggcccggcggcgcgagcagagccactccagggagggggggagaccgcgagcggccggctcagcccccgccacccggggcgggaccccgaggccccggagggaccccaactccagccacgtcttgctgcgcgcccgcccggcgcggccactgccagcacgctccgggcccgccgcccgcgcgcgcggcacagacgcggggccacacttggcgccgccgcccggtgccccgcacgctcgcatgggcccgcgctgagggccccgacgaggagtcccgcgcggagtatcggcgtccacccgcccagggagagtcagacctgggggggcgagggccccccaaactcagttcggatcctacccgagtgaggcggcgccatggagctccgggtgctgctctgctgggcttcgttggccgcagctttggaagagaccctgctgaacacaaaattggaaactgctgatctgaagtgggtgacattccctcaggtggacgggcagtgggaggaactgagcggcctggatgaggaacagcacagcgtgcgcacctacgaagtgtgtgacgtgcagcgtgccccgggccaggcccactggcttcgcacaggttgggtcccacggcggggcgccgtccacgtgtacgccacgctgcgcttcaccatgctcgagtgcctgtccctgcctcgggctgggcgctcctgcaaggagaccttcaccgtcttctactatgagagcgatgcggacacggccacggccctcacgccagcctggatggagaacccctacatcaaggtggacacggtggccgcggagcatctcacccggaagcgccctggggccgaggccaccgggaaggtgaatgtcaagacgctgcgtctgggaccgctcagcaaggctggcttctacctggccttccaggaccagggtgcctgcatggccctgctatccctgcacctcttctacaaaaagtgcgcccagctgactgtgaacctgactcgattcccggagactgtgcctcgggagctggttgtgcccgtggccggtagctgcgtggtggatgccgtccccgcccctggccccagccccagcctctactgccgtgaggatggccagtgggccgaacagccggtcacgggctgcagctgtgctccggggttcgaggcagctgaggggaacaccaagtgccgagcctgtgcccagggcaccttcaagcccctgtcaggagaagggtcctgccagccatgcccagccaatagccactctaacaccattggatcagccgtctgccagtgccgcgtcgggtacttccgggcacgcacagacccccggggtgcaccctgcaccacccctccttcggctccgcggagcgtggtttcccgcctgaacggctcctccctgcacctggaatggagtgcccccctggagtctggtggccgagaggacctcacctacgccctccgctgccgggagtgccgacccggaggctcctgtgcgccctgcgggggagacctgacttttgaccccggcccccgggacctggtggagccctgggtggtggttcgagggctacgtcctgacttcacctatacctttgaggtcactgcattgaacggggtatcctccttagccacggggcccgtcccatttgagcctgtcaatgtcaccactgaccgagaggtacctcctgcagtgtctgacatccgggtgacgcggtcctcacccagcagcttgagcctggcctgggctgttccccgggcacccagtggggctgtgctggactacgaggtcaaataccatgagaagggcgccgagggtcccagcagcgtgcggttcctgaagacgtcagaaaaccgggcagagctgcgggggctgaagcggggagccagctacctggtgcaggtacgggcgcgctctgaggccggctacgggcccttcggccaggaacatcacagccagacccaactggatgagagcgagggctggcgggagcagctggccctgattgcgggcacggcagtcgtgggtgtggtcctggtcctggtggtcattgtggtcgcagttctctgcctcaggaagcagagcaatgggagagaagcagaatattcggacaaacacggacagtatctcatcggacatggtactaaggtctacatcgaccccttcacttatgaagaccctaatgaggctgtgagggaatttgcaaaagagatcgatgtctcctacgtcaagattgaagaggtgattggtgcaggtgagtttggcgaggtgtgccgggggcggctcaaggccccagggaagaaggagagctgtgtggcaatcaagaccctgaagggtggctacacggagcggcagcggcgtgagtttctgagcgaggcctccatcatgggccagttcgagcaccccaatatcatccgcctggagggcgtggtcaccaacagcatgcccgtcatgattctcacagagttcatggagaacggcgccctggactccttcctgcggctaaacgacggacagttcacagtcatccagctcgtgggcatgctgcggggcatcgcctcgggcatgcggtaccttgccgagatgagctacgtccaccgagacctggctgctcgcaacatcctagtcaacagcaacctcgtctgcaaagtgtctgactttggcctttcccgattcctggaggagaactcttccgatcccacctacacgagctccctgggaggaaagattcccatccgatggactgccccggaggccattgccttccggaagttcacttccgccagtgatgcctggagttacgggattgtgatgtgggaggtgatgtcatttggggagaggccgtactgggacatgagcaatcaggacgtgatcaatgccattgaacaggactaccggctgcccccgcccccagactgtcccacctccctccaccagctcatgctggactgttggcagaaagaccggaatgcccggccccgcttcccccaggtggtcagcgccctggacaagatgatccggaaccccgccagcctcaaaatcgtggcccgggagaatggcggggcctcacaccctctcctggaccagcggcagcctcactactcagcttttggctctgtgggcgagtggcttcgggccatcaaaatgggaagatacgaagaaagtttcgcagccgctggctttggctccttcgagctggtcagccagatctctgctgaggacctgctccgaatcggagtcactctggcgggacaccagaagaaaatcttggccagtgtccagcacatgaagtcccaggccaagccgggaaccccgggtgggacaggaggaccggccccgcagtactgacctgcaggaactccccaccccagggacaccgcctccccattttccggggcagagtggggactcacagaggcccccagccctgtgccccgctggattgcactttgagcccgtggggtgaggagttggcaatttggagagacaggatttgggggttctgccataataggaggggaaaatcaccccccagccacctcggggaactccagaccaagggtgagggcgcctttccctcaggactgggtgtgaccagaggaaaaggaagtgcccaacatctcccagcctccccaggtgcccccctcaccttgatgggtgcgttcccgcagaccaaagagagtgtgactcccttgccagctccagagtgggggggctgtcccagggggcaagaaggggtgtcagggcccagtgacaaaatcattggggtttgtagtcccaacttgctgctgtcaccaccaaactcaatcatttttttcccttgtaaatgcccctcccccagctgctgccttcatattgaaggtttttgagttttgtttttggtcttaatttttctccccgttccctttttgtttcttcgttttgtttttctaccgtccttgtcataactttgtgttggagggaacctgtttcactatggcctcctttgcccaagttgaaacaggggcccatcatcatgtctgtttccagaacagtgccttggtcatcccacatccccggaccccgcctgggacccccaagctgtgtcctatgaaggggtgtggggtgaggtagtgaaaagggcggtagttggtggtggaacccagaaacggacgccggtgcttggaggggttcttaaattatatttaaaaaagtaactttttgtataaataaaagaaaatgggacgtgtcccagctccaggggtaaaaaaaaaaaaaaaaaa

SEQ ID NO: 239 - DNA, 4059 bp, Homo sapiens
  ref <308>: DATABASE ACCESSION NUMBER: GenBank No. NM004445
  ref <309>: DATABASE ENTRY DATE: 2004-11-29
ggggcgggccgggccggcttgggaggggacgcggagggggcgggccgggctgcgttcgctccagccgcggctctacagcagcgggcggcgggacccgggacccagcttggcgacggcgatctcgacgcgggcccccaggatctcccggcgccccacctctggagcagcccctgccgccagcgtcaggtccaccccggaatcccagggactctcggcgccgaacggacccgggccgggtgcaacggggtccccggactggagaagacgcgggtggcaccgtgcgagctccaggagccccgggtccactgcgaggcctcggggggcgcagacctgcagagactgcggccaacgggaagaaataaagggattatagtccacccaattcacagacttctgagactcagacacgaggagagatagagaaccgccaatctctagatcaacaagcaaaggaggtgccaagcctgtttgtcttcattgtgacactggagtctagatgctgggaagtccaagatcagggtgccggcatggtcagttcctggcgaagcctctcttctaggtttcagactgccctcttctttgttgtgtcctcgaatggcagaaaaaggggtggctgttggaggaagggaggagagtaaatgaagagaaagaactggaataaccccttgcagaaaaaaaaaaaaagggaagcaagcttagctgtacaccctgagtcttgcaaaagctgcagccccacccaggagcagggtggtggctggggcgatggtggacgccctgaagatgtcccatggctactgaaggggctgcccagttagggaacagagtggcgggcatggtgtgtagcctatgggtgctgctcctggtgtcttcagttctggctctggaagaggtattgctggacaccaccggagagacatctgagattggctggctcacctacccaccaggggggtgggacgaggtgagtgttctggacgaccagcgacgcctgactcggacctttgaggcatgtcatgtggcaggggcccctccaggcaccgggcaggacaattggttgcagacacactttgtggagcggcgcggggcccagagggcgcacattcgactccacttctctgtgcgggcatgctccagcctgggtgtgagcggcggcacctgccgggagaccttcaccctttactaccgtcaggctgaggagcccgacagccctgacagcgtttcctcctggcacctcaaacgctggaccaaggtggacacaattgcagcagacgagagctttccctcctcctcctcctcctcctcctcttcttcctctgcagcgtgggctgtgggaccccacggggctgggcagcgggctggactgcaactgaacgtcaaagagcggagctttgggcctctcacccaacgcggcttctacgtggccttccaggacacgggggcctgcctggccctggtcgctgtcaggctcttctcctacacctgccctgccgtgctccgatcctttgcttcctttccagagacgcaggccagtggggctgggggggcctccctggtggcagctgtgggcacctgtgtggctcatgcagagccagaggaggatggagtagggggccaggcaggaggcagcccccccaggctgcactgcaacggggagggcaagtggatggtagctgtcgggggctgccgctgccagcctggataccaaccagcacgaggagacaaggcctgccaagcctgcccacgggggctctataagtcttctgctgggaatgctccctgctcaccatgccctgcccgcagtcacgctcccaacccagcagcccccgtttgcccctgcctggagggcttctaccgggccagttccgacccaccagaggccccctgcactggtcctccatcggctccccaggagctttggtttgaggtgcaaggctcagcactcatgctacactggcgcctgcctcgggagctggggggtcgaggggacctgctcttcaatgtcgtgtgcaaggagtgtgaaggccgccaggaacctgccagcggtggtgggggcacttgtcaccgctgcagggatgaggtccacttcgaccctcgccagagaggcctgactgagagccgagtgttagtggggggactccgggcacacgtaccctacatcttagaggtgcaggctgttaatggggtgtctgagctcagccctgaccctcctcaggctgcagccatcaatgtcagcaccagccatgaagtgccctctgctgtccctgtggtgcaccaggtgagccgggcatccaacagcatcacggtgtcctggccgcagcccgaccagaccaatgggaacatcctggactatcagctccgctactatgaccaggcagaagacgaatcccactccttcaccctgaccagcgagaccaacactgccaccgtgacacagctgagccctggccacatctatggtttccaggtgcgggcccggactgctgccggccacggcccctacgggggcaaagtctatttccagacacttcctcaaggggagctgtcttcccagcttccggaaagactctccttggtgatcggctccatcctgggggctttggccttcctcctgctggcagccatcaccgtgctggcggtcgtcttccagcggaagcggcgtgggactggctacacggagcagctgcagcaatacagcagcccaggactcggggtgaagtattacatcgacccctccacctacgaggacccctgtcaggccatccgagaacttgcccgggaagtcgatcctgcttatatcaagattgaggaggtcattgggacaggctcttttggagaagtgcgccagggccgcctgcagccacggggacggagggagcagactgtggccatccaggccctgtgggccgggggcgccgaaagcctgcagatgaccttcctgggccgggccgcagtgctgggtcagttccagcaccccaacatcctgcggctggagggcgtggtcaccaagagccgacccctcatggtgctgacggagttcatggagcttggccccctggacagcttcctcaggcagcgggagggccagttcagcagcctgcagctggtggccatgcagcggggagtggctgctgccatgcagtacctgtccagctttgccttcgtccatcgctcgctgtctgcccacagcgtgctggtgaatagccacttggtgtgcaaggtggcccgtcttggccacagtcctcagggcccaagttgtttgcttcgctgggcagccccagaggtcattgcacatggaaagcatacaacatccagtgatgtctggagctttgggatactcatgtgggaagtgatgagttatggagaacggccttactgggacatgagtgagcaggaggtactaaatgcaatagagcaggagttccggctgcccccgcctccaggctgtcctcctggattacatctacttatgttggacacttggcagaaggaccgtgcccggcggcctcattttgaccagctggtggctgcatttgacaagatgatccgcaagccagataccctgcaggctggcggggacccaggggaaaggccttcccaggcccttctgacccctgtggccctggactttccttgtctggactcaccccaggcctggctttcagccattggactggagtgctaccaggacaacttctccaagtttggcctctgtaccttcagtgatgtggctcagctcagcctagaagacctgcctgccctgggcatcaccctggctggccaccagaagaagctgctgcaccacatccagctccttcagcaacacctgaggcagcagggctcagtggaggtctgagaatgacgatacccgtgactcagccctggacactggtccgagaagggacatgtgggacgtgagccgggctccaacagcctctgtgagagatgccccacaccaaacccaaccctcccgatggctgcattccctggtcctccgcctctccaccagccccctcctcattaaagggaaagaagggaatttgcaaaaaaaaaaaaaaaaaa

SEQ ID NO: 240 - DNA, 4624 bp, Homo sapiens
  ref <308>: DATABASE ACCESSION NUMBER: GenBank No. NM004448
  ref <309>: DATABASE ENTRY DATE: 2004-12-20
ggaggaggtggaggaggagggctgcttgaggaagtataagaatgaagttgtgaagctgagattcccctccattgggaccggagaaaccaggggagccccccgggcagccgcgcgccccttcccacggggccctttactgcgccgcgcgcccggcccccacccctcgcagcaccccgcgccccgcgccctcccagccgggtccagccggagccatggggccggagccgcagtgagcaccatggagctggcggccttgtgccgctgggggctcctcctcgccctcttgccccccggagccgcgagcacccaagtgtgcaccggcacagacatgaagctgcggctccctgccagtcccgagacccacctggacatgctccgccacctctaccagggctgccaggtggtgcagggaaacctggaactcacctacctgcccaccaatgccagcctgtccttcctgcaggatatccaggaggtgcagggctacgtgctcatcgctcacaaccaagtgaggcaggtcccactgcagaggctgcggattgtgcgaggcacccagctctttgaggacaactatgccctggccgtgctagacaatggagacccgctgaacaataccacccctgtcacaggggcctccccaggaggcctgcgggagctgcagcttcgaagcctcacagagatcttgaaaggaggggtcttgatccagcggaacccccagctctgctaccaggacacgattttgtggaaggacatcttccacaagaacaaccagctggctctcacactgatagacaccaaccgctctcgggcctgccacccctgttctccgatgtgtaagggctcccgctgctggggagagagttctgaggattgtcagagcctgacgcgcactgtctgtgccggtggctgtgcccgctgcaaggggccactgcccactgactgctgccatgagcagtgtgctgccggctgcacgggccccaagcactctgactgcctggcctgcctccacttcaaccacagtggcatctgtgagctgcactgcccagccctggtcacctacaacacagacacgtttgagtccatgcccaatcccgagggccggtatacattcggcgccagctgtgtgactgcctgtccctacaactacctttctacggacgtgggatcctgcaccctcgtctgccccctgcacaaccaagaggtgacagcagaggatggaacacagcggtgtgagaagtgcagcaagccctgtgcccgagtgtgctatggtctgggcatggagcacttgcgagaggtgagggcagttaccagtgccaatatccaggagtttgctggctgcaagaagatctttgggagcctggcatttctgccggagagctttgatggggacccagcctccaacactgccccgctccagccagagcagctccaagtgtttgagactctggaagagatcacaggttacctatacatctcagcatggccggacagcctgcctgacctcagcgtcttccagaacctgcaagtaatccggggacgaattctgcacaatggcgcctactcgctgaccctgcaagggctgggcatcagctggctggggctgcgctcactgagggaactgggcagtggactggccctcatccaccataacacccacctctgcttcgtgcacacggtgccctgggaccagctctttcggaacccgcaccaagctctgctccacactgccaaccggccagaggacgagtgtgtgggcgagggcctggcctgccaccagctgtgcgcccgagggcactgctggggtccagggcccacccagtgtgtcaactgcagccagttccttcggggccaggagtgcgtggaggaatgccgagtactgcaggggctccccagggagtatgtgaatgccaggcactgtttgccgtgccaccctgagtgtcagccccagaatggctcagtgacctgttttggaccggaggctgaccagtgtgtggcctgtgcccactataaggaccctcccttctgcgtggcccgctgccccagcggtgtgaaacctgacctctcctacatgcccatctggaagtttccagatgaggagggcgcatgccagccttgccccatcaactgcacccactcctgtgtggacctggatgacaagggctgccccgccgagcagagagccagccctctgacgtccatcatctctgcggtggttggcattctgctggtcgtggtcttgggggtggtctttgggatcctcatcaagcgacggcagcagaagatccggaagtacacgatgcggagactgctgcaggaaacggagctggtggagccgctgacacctagcggagcgatgcccaaccaggcgcagatgcggatcctgaaagagacggagctgaggaaggtgaaggtgcttggatctggcgcttttggcacagtctacaagggcatctggatccctgatggggagaatgtgaaaattccagtggccatcaaagtgttgagggaaaacacatcccccaaagccaacaaagaaatcttagacgaagcatacgtgatggctggtgtgggctccccatatgtctcccgccttctgggcatctgcctgacatccacggtgcagctggtgacacagcttatgccctatggctgcctcttagaccatgtccgggaaaaccgcggacgcctgggctcccaggacctgctgaactggtgtatgcagattgccaaggggatgagctacctggaggatgtgcggctcgtacacagggacttggccgctcggaacgtgctggtcaagagtcccaaccatgtcaaaattacagacttcgggctggctcggctgctggacattgacgagacagagtaccatgcagatgggggcaaggtgcccatcaagtggatggcgctggagtccattctccgccggcggttcacccaccagagtgatgtgtggagttatggtgtgactgtgtgggagctgatgacttttggggccaaaccttacgatgggatcccagcccgggagatccctgacctgctggaaaagggggagcggctgccccagccccccatctgcaccattgatgtctacatgatcatggtcaaatgttggatgattgactctgaatgtcggccaagattccgggagttggtgtctgaattctcccgcatggccagggacccccagcgctttgtggtcatccagaatgaggacttgggcccagccagtcccttggacagcaccttctaccgctcactgctggaggacgatgacatgggggacctggtggatgctgaggagtatctggtaccccagcagggcttcttctgtccagaccctgccccgggcgctgggggcatggtccaccacaggcaccgcagctcatctaccaggagtggcggtggggacctgacactagggctggagccctctgaagaggaggcccccaggtctccactggcaccctccgaaggggctggctccgatgtatttgatggtgacctgggaatgggggcagccaaggggctgcaaagcctccccacacatgaccccagccctctacagcggtacagtgaggaccccacagtacccctgccctctgagactgatggctacgttgcccccctgacctgcagcccccagcctgaatatgtgaaccagccagatgttcggccccagcccccttcgccccgagagggccctctgcctgctgcccgacctgctggtgccactctggaaaggcccaagactctctccccagggaagaatggggtcgtcaaagacgtttttgcctttgggggtgccgtggagaaccccgagtacttgacaccccagggaggagctgcccctcagccccaccctcctcctgccttcagcccagccttcgacaacctctattactgggaccaggacccaccagagcggggggctccacccagcaccttcaaagggacacctacggcagagaacccagagtacctgggtctggacgtgccagtgtgaaccagaaggccaagtccgcagaagccctgatgtgtcctcagggagcagggaaggcctgacttctgctggcatcaagaggtgggagggccctccgaccacttccaggggaacctgccatgccaggaacctgtcctaaggaaccttccttcctgcttgagttcccagatggctggaaggggtccagcctcgttggaagaggaacagcactggggagtctttgtggattctgaggccctgcccaatgagactctagggtccagtggatgccacagcccagcttggccctttccttccagatcctgggtactgaaagccttagggaagctggcctgagaggggaagcggccctaagggagtgtctaagaacaaaagcgacccattcagagactgtccctgaaacctagtactgccccccatgaggaaggaacagcaatggtgtcagtatccaggctttgtacagagtgcttttctgtttagtttttactttttttgttttgtttttttaaagatgaaataaagacccagggggagaatgggtgttgtatggggaggcaagtgtggggggtccttctccacacccactttgtccatttgcaaatatattttggaaaacagcta

SEQ ID NO: 241 - DNA, 5511 bp, Homo sapiens
  ref <308>: DATABASE ACCESSION NUMBER: GenBank No. NM001982
  ref <309>: DATABASE ENTRY DATE: 2004-12-20
acacacacacacccctcccctgccatccctccccggactccggctccggctccgattgcaatttgcaacctccgctgccgtcgccgcagcagccaccaattcgccagcggttcaggtggctcttgcctcgatgtcctagcctaggggcccccgggccggacttggctgggctcccttcaccctctgcggagtcatgagggcgaacgacgctctgcaggtgctgggcttgcttttcagcctggcccggggctccgaggtgggcaactctcaggcagtgtgtcctgggactctgaatggcctgagtgtgaccggcgatgctgagaaccaataccagacactgtacaagctctacgagaggtgtgaggtggtgatggggaaccttgagattgtgctcacgggacacaatgccgacctctccttcctgcagtggattcgagaagtgacaggctatgtcctcgtggccatgaatgaattctctactctaccattgcccaacctccgcgtggtgcgagggacccaggtctacgatgggaagtttgccatcttcgtcatgttgaactataacaccaactccagccacgctctgcgccagctccgcttgactcagctcaccgagattctgtcagggggtgtttatattgagaagaacgataagctttgtcacatggacacaattgactggagggacatcgtgagggaccgagatgctgagatagtggtgaaggacaatggcagaagctgtcccccctgtcatgaggtttgcaaggggcgatgctggggtcctggatcagaagactgccagacattgaccaagaccatctgtgctcctcagtgtaatggtcactgctttgggcccaaccccaaccagtgctgccatgatgagtgtgccgggggctgctcaggccctcaggacacagactgctttgcctgccggcacttcaatgacagtggagcctgtgtacctcgctgtccacagcctcttgtctacaacaagctaactttccagctggaacccaatccccacaccaagtatcagtatggaggagtttgtgtagccagctgtccccataactttgtggtggatcaaacatcctgtgtcagggcctgtcctcctgacaagatggaagtagataaaaatgggctcaagatgtgtgagccttgtgggggactatgtcccaaagcctgtgagggaacaggctctgggagccgcttccagactgtggactcgagcaacattgatggatttgtgaactgcaccaagatcctgggcaacctggactttctgatcaccggcctcaatggagacccctggcacaagatccctgccctggacccagagaagctcaatgtcttccggacagtacgggagatcacaggttacctgaacatccagtcctggccgccccacatgcacaacttcagtgttttttccaatttgacaaccattggaggcagaagcctctacaaccggggcttctcattgttgatcatgaagaacttgaatgtcacatctctgggcttccgatccctgaaggaaattagtgctgggcgtatctatataagtgccaataggcagctctgctaccaccactctttgaactggaccaaggtgcttcgggggcctacggaagagcgactagacatcaagcataatcggccgcgcagagactgcgtggcagagggcaaagtgtgtgacccactgtgctcctctgggggatgctggggcccaggccctggtcagtgcttgtcctgtcgaaattatagccgaggaggtgtctgtgtgacccactgcaactttctgaatggggagcctcgagaatttgcccatgaggccgaatgcttctcctgccacccggaatgccaacccatggagggcactgccacatgcaatggctcgggctctgatacttgtgctcaatgtgcccattttcgagatgggccccactgtgtgagcagctgcccccatggagtcctaggtgccaagggcccaatctacaagtacccagatgttcagaatgaatgtcggccctgccatgagaactgcacccaggggtgtaaaggaccagagcttcaagactgtttaggacaaacactggtgctgatcggcaaaacccatctgacaatggctttgacagtgatagcaggattggtagtgattttcatgatgctgggcggcacttttctctactggcgtgggcgccggattcagaataaaagggctatgaggcgatacttggaacggggtgagagcatagagcctctggaccccagtgagaaggctaacaaagtcttggccagaatcttcaaagagacagagctaaggaagcttaaagtgcttggctcgggtgtctttggaactgtgcacaaaggagtgtggatccctgagggtgaatcaatcaagattccagtctgcattaaagtcattgaggacaagagtggacggcagagttttcaagctgtgacagatcatatgctggccattggcagcctggaccatgcccacattgtaaggctgctgggactatgcccagggtcatctctgcagcttgtcactcaatatttgcctctgggttctctgctggatcatgtgagacaacaccggggggcactggggccacagctgctgctcaactggggagtacaaattgccaagggaatgtactaccttgaggaacatggtatggtgcatagaaacctggctgcccgaaacgtgctactcaagtcacccagtcaggttcaggtggcagattttggtgtggctgacctgctgcctcctgatgataagcagctgctatacagtgaggccaagactccaattaagtggatggcccttgagagtatccactttgggaaatacacacaccagagtgatgtctggagctatggtgtgacagtttgggagttgatgaccttcggggcagagccctatgcagggctacgattggctgaagtaccagacctgctagagaagggggagcggttggcacagccccagatctgcacaattgatgtctacatggtgatggtcaagtgttggatgattgatgagaacattcgcccaacctttaaagaactagccaatgagttcaccaggatggcccgagacccaccacggtatctggtcataaagagagagagtgggcctggaatagcccctgggccagagccccatggtctgacaaacaagaagctagaggaagtagagctggagccagaactagacctagacctagacttggaagcagaggaggacaacctggcaaccaccacactgggctccgccctcagcctaccagttggaacacttaatcggccacgtgggagccagagccttttaagtccatcatctggatacatgcccatgaaccagggtaatcttggggagtcttgccaggagtctgcagtttctgggagcagtgaacggtgcccccgtccagtctctctacacccaatgccacggggatgcctggcatcagagtcatcagaggggcatgtaacaggctctgaggctgagctccaggagaaagtgtcaatgtgtaggagccggagcaggagccggagcccacggccacgcggagatagcgcctaccattcccagcgccacagtctgctgactcctgttaccccactctccccacccgggttagaggaagaggatgtcaacggttatgtcatgccagatacacacctcaaaggtactccctcctcccgggaaggcaccctttcttcagtgggtctcagttctgtcctgggtactgaagaagaagatgaagatgaggagtatgaatacatgaaccggaggagaaggcacagtccacctcatccccctaggccaagttcccttgaggagctgggttatgagtacatggatgtggggtcagacctcagtgcctctctgggcagcacacagagttgcccactccaccctgtacccatcatgcccactgcaggcacaactccagatgaagactatgaatatatgaatcggcaacgagatggaggtggtcctgggggtgattatgcagccatgggggcctgcccagcatctgagcaagggtatgaagagatgagagcttttcaggggcctggacatcaggccccccatgtccattatgcccgcctaaaaactctacgtagcttagaggctacagactctgcctttgataaccctgattactggcatagcaggcttttccccaaggctaatgcccagagaacgtaactcctgctccctgtggcactcagggagcatttaatggcagctagtgcctttagagggtaccgtcttctccctattccctctctctcccaggtcccagccccttttccccagtcccagacaattccattcaatctttggaggcttttaaacattttgacacaaaattcttatggtatgtagccagctgtgcactttcttctctttcccaaccccaggaaaggttttccttattttgtgtgctttcccagtcccattcctcagcttcttcacaggcactcctggagatatgaaggattactctccatatcccttcctctcaggctcttgactacttggaactaggctcttatgtgtgcctttgtttcccatcagactgtcaagaagaggaaagggaggaaacctagcagaggaaagtgtaattttggtttatgactcttaaccccctagaaagacagaagcttaaaatctgtgaagaaagaggttaggagtagatattgattactatcataattcagcacttaactatgagccaggcatcatactaaacttcacctacattatctcacttagtcctttatcatccttaaaacaattctgtgacatacatattatctcattttacacaaagggaagtcgggcatggtggctcatgcctgtaatctcagcactttgggaggctgaggcagaaggattacctgaggcaaggagtttgagaccagcttagccaacatagtaagacccccatctctttaaaaaaaaaaaaaaaaaaaaaaaaaaaactttagaactgggtgcagtggctcatgcctgtaatcccagccagcactttgggaggctgagatgggaagatcacttgagcccagaattagagataagcctatggaaacatagcaagacactgtctctacaggggaaaaaaaaaaaagaaactgagccttaaagagatgaaataaattaagcagtagatccaggatgcaaaatcctcccaattcctgtgcatgtgctcttattgtaaggtgccaagaaaaactgatttaagttacagcccttgtttaaggggcactgtttcttgtttttgcactgaatcaagtctaaccccaacagccacatcctcctatacctagacatctcatctcaggaagtggtggtgggggtagtcagaaggaaaaataactggacatctttgtgtaaaccataatccacatgtgccgtaaatgatcttcactccttatccgagggcaaattcacaaggatccccaagatccacttttagaagccattctcatcca

SEQ ID NO: 242 - DNA, 4587 bp, Homo sapiens
  ref <308>: DATABASE ACCESSION NUMBER: GenBank No. NM000141
  ref <309>: DATABASE ENTRY DATE: 2004-12-20
gagcgggcgagggagcgcgcgcggccgccacaaagctcgggcgccgcggggctgcatgcggcgtacctggcccggcgcggcgactgctctccgggctggcgggggccggccgcgagccccgggggccccgaggccgcagcttgcctgcgcgctctgagccttcgcaactcgcgagcaaagtttggtggaggcaacgccaagcctgagtcctttcttcctctcgttccccaaatccgagggcagcccgcgggcgtcatgcccgcgctcctccgcagcctggggtacgcgtgaagcccgggaggcttggcgccggcgaagacccaaggaccactcttctgcgtttggagttgctccccacaaccccgggctcgtcgctttctccatcccgacccacgcggggcgcggggacaacacaggtcgcggaggagcgttgccattcaagtgactgcagcagcagcggcagcgcctcggttcctgagcccaccgcaggctgaaggcattgcgcgtagtccatgcccgtagaggaagtgtgcagatgggattaacgtccacatggagatatggaagaggaccggggattggtaccgtaaccatggtcagctggggtcgtttcatctgcctggtcgtggtcaccatggcaaccttgtccctggcccggccctccttcagtttagttgaggataccacattagagccagaagagccaccaaccaaataccaaatctctcaaccagaagtgtacgtggctgcgccaggggagtcgctagaggtgcgctgcctgttgaaagatgccgccgtgatcagttggactaaggatggggtgcacttggggcccaacaataggacagtgcttattggggagtacttgcagataaagggcgccacgcctagagactccggcctctatgcttgtactgccagtaggactgtagacagtgaaacttggtacttcatggtgaatgtcacagatgccatctcatccggagatgatgaggatgacaccgatggtgcggaagattttgtcagtgagaacagtaacaacaagagagcaccatactggaccaacacagaaaagatggaaaagcggctccatgctgtgcctgcggccaacactgtcaagtttcgctgcccagccggggggaacccaatgccaaccatgcggtggctgaaaaacgggaaggagtttaagcaggagcatcgcattggaggctacaaggtacgaaaccagcactggagcctcattatggaaagtgtggtcccatctgacaagggaaattatacctgtgtggtggagaatgaatacgggtccatcaatcacacgtaccacctggatgttgtggagcgatcgcctcaccggcccatcctccaagccggactgccggcaaatgcctccacagtggtcggaggagacgtagagtttgtctgcaaggtttacagtgatgcccagccccacatccagtggatcaagcacgtggaaaagaacggcagtaaatacgggcccgacgggctgccctacctcaaggttctcaaggccgccggtgttaacaccacggacaaagagattgaggttctctatattcggaatgtaacttttgaggacgctggggaatatacgtgcttggcgggtaattctattgggatatcctttcactctgcatggttgacagttctgccagcgcctggaagagaaaaggagattacagcttccccagactacctggagatagccatttactgcataggggtcttcttaatcgcctgtatggtggtaacagtcatcctgtgccgaatgaagaacacgaccaagaagccagacttcagcagccagccggctgtgcacaagctgaccaaacgtatccccctgcggagacaggtaacagtttcggctgagtccagctcctccatgaactccaacaccccgctggtgaggataacaacacgcctctcttcaacggcagacacccccatgctggcaggggtctccgagtatgaacttccagaggacccaaaatgggagtttccaagagataagctgacactgggcaagcccctgggagaaggttgctttgggcaagtggtcatggcggaagcagtgggaattgacaaagacaagcccaaggaggcggtcaccgtggccgtgaagatgttgaaagatgatgccacagagaaagacctttctgatctggtgtcagagatggagatgatgaagatgattgggaaacacaagaatatcataaatcttcttggagcctgcacacaggatgggcctctctatgtcatagttgagtatgcctctaaaggcaacctccgagaatacctccgagcccggaggccacccgggatggagtactcctatgacattaaccgtgttcctgaggagcagatgaccttcaaggacttggtgtcatgcacctaccagctggccagaggcatggagtacttggcttcccaaaaatgtattcatcgagatttagcagccagaaatgttttggtaacagaaaacaatgtgatgaaaatagcagactttggactcgccagagatatcaacaatatagactattacaaaaagaccaccaatgggcggcttccagtcaagtggatggctccagaagccctgtttgatagagtatacactcatcagagtgatgtctggtccttcggggtgttaatgtgggagatcttcactttagggggctcgccctacccagggattcccgtggaggaactttttaagctgctgaaggaaggacacagaatggataagccagccaactgcaccaacgaactgtacatgatgatgagggactgttggcatgcagtgccctcccagagaccaacgttcaagcagttggtagaagacttggatcgaattctcactctcacaaccaatgaggaatacttggacctcagccaacctctcgaacagtattcacctagttaccctgacacaagaagttcttgttcttcaggagatgattctgttttttctccagaccccatgccttacgaaccatgccttcctcagtatccacacataaacggcagtgttaaaacatgaatgactgtgtctgcctgtccccaaacaggacagcactgggaacctagctacactgagcagggagaccatgcctcccagagcttgttgtctccacttgtatatatggatcagaggagtaaataattggaaaagtaatcagcatatgtgtaaagatttatacagttgaaaacttgtaatcttccccaggaggagaagaaggtttctggagcagtggactgccacaagccaccatgtaacccctctcacctgccgtgcgtactggctgtggaccagtaggactcaaggtggacgtgcgttctgccttccttgttaattttgtaataattggagaagatttatgtcagcacacacttacagagcacaaatgcagtatataggtgctggatgtatgtaaatatattcaaattatgtataaatatatattatatatttacaaggagttattttttgtattgattttaaatggatgtcccaatgcacctagaaaattggtctctctttttttaatagctatttgctaaatgctgttcttacacataatttcttaattttcaccgagcagaggtggaaaaatacttttgctttcagggaaaatggtataacgttaatttattaataaattggtaatatacaaaacaattaatcatttatagttttttttgtaatttaagtggcatttctatgcaggcagcacagcagactagttaatctattgcttggacttaactagttatcagatcctttgaaaagagaatatttacaatatatgactaatttggggaaaatgaagttttgatttatttgtgtttaaatgctgctgtcagacgattgttcttagacctcctaaatgccccatattaaaagaactcattcataggaaggtgtttcattttggtgtgcaaccctgtcattacgtcaacgcaacgtctaactggacttcccaagataaatggtaccagcgtcctcttaaaagatgccttaatccattccttgaggacagaccttagttgaaatgatagcagaatgtgcttctctctggcagctggccttctgcttctgagttgcacattaatcagattagcctgattctcttcagtgaattttgataatggcttccagactctttgcgttggagacgcctgttaggatcttcaagtcccatcatagaaaattgaaacacagagttgttctgctgatagttttggggatacgtccatctttttaagggattgctttcatctaattctggcaggacctcaccaaaagatccagcctcatacctacatcagacaaaatatcgccgttgttccttctgtactaaagtattgtgttttgctttggaaacacccactcactttgcaatagccgtgcaagatgaatgcagattacactgatcttatgtgttacaaaattggagaaagtatttaataaaacctgttaatttttatactgacaataaaaatgtttctacagatattaatgttaacaagacaaaataaatgtcacgcaacttaaaaaaaaaaaaaaaa

SEQ ID NO: 243 - DNA, 4093 bp, Homo sapiens
  ref <308>: DATABASE ACCESSION NUMBER: GenBank No. NM000142
  ref <309>: DATABASE ENTRY DATE: 2004-12-20
cgcgcgctgcctgaggacgccgcggcccccgcccccgccatgggcgcccctgcctgcgccctcgcgctctgcgtggccgtggccatcgtggccggcgcctcctcggagtccttggggacggagcagcgcgtcgtggggcgagcggcagaagtcccgggcccagagcccggccagcaggagcagttggtcttcggcagcggggatgctgtggagctgagctgtcccccgcccgggggtggtcccatggggcccactgtctgggtcaaggatggcacagggctggtgccctcggagcgtgtcctggtggggccccagcggctgcaggtgctgaatgcctcccacgaggactccggggcctacagctgccggcagcggctcacgcagcgcgtactgtgccacttcagtgtgcgggtgacagacgctccatcctcgggagatgacgaagacggggaggacgaggctgaggacacaggtgtggacacaggggccccttactggacacggcccgagcggatggacaagaagctgctggccgtgccggccgccaacaccgtccgcttccgctgcccagccgctggcaaccccactccctccatctcctggctgaagaacggcagggagttccgcggcgagcaccgcattggaggcatcaagctgcggcatcagcagtggagcctggtcatggaaagcgtggtgccctcggaccgcggcaactacacctgcgtcgtggagaacaagtttggcagcatccggcagacgtacacgctggacgtgctggagcgctccccgcaccggcccatcctgcaggcggggctgccggccaaccagacggcggtgctgggcagcgacgtggagttccactgcaaggtgtacagtgacgcacagccccacatccagtggctcaagcacgtggaggtgaacggcagcaaggtgggcccggacggcacaccctacgttaccgtgctcaagacggcgggcgctaacaccaccgacaaggagctagaggttctctccttgcacaacgtcacctttgaggacgccggggagtacacctgcctggcgggcaattctattgggttttctcatcactctgcgtggctggtggtgctgccagccgaggaggagctggtggaggctgacgaggcgggcagtgtgtatgcaggcatcctcagctacggggtgggcttcttcctgttcatcctggtggtggcggctgtgacgctctgccgcctgcgcagcccccccaagaaaggcctgggctcccccaccgtgcacaagatctcccgcttcccgctcaagcgacaggtgtccctggagtccaacgcgtccatgagctccaacacaccactggtgcgcatcgcaaggctgtcctcaggggagggccccacgctggccaatgtctccgagctcgagctgcctgccgaccccaaatgggagctgtctcgggcccggctgaccctgggcaagccccttggggagggctgcttcggccaggtggtcatggcggaggccatcggcattgacaaggaccgggccgccaagcctgtcaccgtagccgtgaagatgctgaaagacgatgccactgacaaggacctgtcggacctggtgtctgagatggagatgatgaagatgatcgggaaacacaaaaacatcatcaacctgctgggcgcctgcacgcagggcgggcccctgtacgtgctggtggagtacgcggccaagggtaacctgcgggagtttctgcgggcgcggcggcccccgggcctggactactccttcgacacctgcaagccgcccgaggagcagctcaccttcaaggacctggtgtcctgtgcctaccaggtggcccggggcatggagtacttggcctcccagaagtgcatccacagggacctggctgcccgcaatgtgctggtgaccgaggacaacgtgatgaagatcgcagacttcgggctggcccgggacgtgcacaacctcgactactacaagaagacaaccaacggccggctgcccgtgaagtggatggcgcctgaggccttgtttgaccgagtctacactcaccagagtgacgtctggtcctttggggtcctgctctgggagatcttcacgctggggggctccccgtaccccggcatccctgtggaggagctcttcaagctgctgaaggagggccaccgcatggacaagcccgccaactgcacacacgacctgtacatgatcatgcgggagtgctggcatgccgcgccctcccagaggcccaccttcaagcagctggtggaggacctggaccgtgtccttaccgtgacgtccaccgacgagtacctggacctgtcggcgcctttcgagcagtactccccgggtggccaggacacccccagctccagctcctcaggggacgactccgtgtttgcccacgacctgctgcccccggccccacccagcagtgggggctcgcggacgtgaagggccactggtccccaacaatgtgaggggtccctagcagccctccctgctgctggtgcacagccactccccggcatgagactcagtgcagatggagagacagctacacagagctttggtctgtgtgtgtgtgtgtgcgtgtgtgtgtgtgtgtgcacatccgcgtgtgcctgtgtgcgtgcgcatcttgcctccaggtgcagaggtaccctgggtgtccccgctgctgtgcaacggtctcctgactggtgctgcagcaccgaggggcctttgttctggggggacccagtgcagaatgtaagtgggcccacccggtgggaccccgtggggcagggagctgggcccgacatggctcggcctctgcctttgcaccacgggacatcacagggtgcgctcggcccctcccacacccaaagctgagcctgcagggaagccccacatgtccagcaccttgtgcctggggtgttagtggcaccgcctccccacctccaggctttcccacttcccaccctgcccctcagagactgaaattacgggtacctgaagatgggagcctttaccttttatgcaaaaggtttattccggaaactagtgtacatttctataaatagatgctgtgtatatggtatatatacatatatatatataacatatatggaagaggaaaaggctggtacaacggaggcctgcgaccctgggggcacaggaggcaggcatggccctgggcggggcgtgggggggcgtggagggaggccccaggggtctcacccatgcaagcagaggaccagggctttttctggcaccgcagttttgttttaaaactggacctgtatatttgtaaagctatttatgggcccctggcactcttgttcccacaccccaacacttccagcatttagctggccacatggcggagagttttaatttttaacttattgacaaccgagaaggtttatcccgccgatagagggacggccaagaatgtacgtccagcctgccccggagctggaggatcccctccaagcctaaaaggttgttaatagttggaggtgattccagtgaagatattttatttgctttgtcctttttcaggagaattagatttctataggatttttctttaggagatttattttttggacttcaaagcaagctggtattttcatacaaattcttctaattgctgtgtgtcccaggcagggagacggtttccagggaggggccggccctgtgtgcaggttccgatgttattagatgttacaagtttatatatatctatatatataatttattgagtttttacaagatgtatttgttgtagacttaacacttcttacgcaatgcttctagagttttatagcctggactgctacctttcaaagcttggagggaagccgtgaattcagttggttcgttctgtactgttactgggccctgagtctgggcagctgtcccttgcttgcctgcagggccatggctcagggtggtctcttcttggggcccagtgcatggtggccagaggtgtcacccaaaccggcaggtgcgattttgttaacccagcgacgaactttccgaaaaataaagacacctggttgctaacctgaaaaaaaaaaaaaaaaaaaaaaaaaaaaaa

SEQ ID NO: 244 - DNA, 3475 bp, Homo sapiens
  ref <308>: DATABASE ACCESSION NUMBER: GenBank No. NM004119
  ref <309>: DATABASE ENTRY DATE: 2005-01-22
cgaggcggcatccgagggctgggccggcgccctgggggaccccgggctccggaggccatgccggcgttggcgcgcgacgcgggcaccgtgccgctgctcgttgttttttctgcaatgatatttgggactattacaaatcaagatctgcctgtgatcaagtgtgttttaatcaatcataagaacaatgattcatcagtggggaagtcatcatcatatcccatggtatcagaatccccggaagacctcgggtgtgcgttgagaccccagagctcagggacagtgtacgaagctgccgctgtggaagtggatgtatctgcttccatcacactgcaagtgctggtcgatgccccagggaacatttcctgtctctgggtctttaagcacagctccctgaattgccagccacattttgatttacaaaacagaggagttgtttccatggtcattttgaaaatgacagaaacccaagctggagaatacctactttttattcagagtgaagctaccaattacacaatattgtttacagtgagtataagaaataccctgctttacacattaagaagaccttactttagaaaaatggaaaaccaggacgccctggtctgcatatctgagagcgttccagagccgatcgtggaatgggtgctttgcgattcacagggggaaagctgtaaagaagaaagtccagctgttgttaaaaaggaggaaaaagtgcttcatgaattatttgggacggacataaggtgctgtgccagaaatgaactgggcagggaatgcaccaggctgttcacaatagatctaaatcaaactcctcagaccacattgccacaattatttcttaaagtaggggaacccttatggataaggtgcaaagctgttcatgtgaaccatggattcgggctcacctgggaattagaaaacaaagcactcgaggagggcaactactttgagatgagtacctattcaacaaacagaactatgatacggattctgtttgcttttgtatcatcagtggcaagaaacgacaccggatactacacttgttcctcttcaaagcatcccagtcaatcagctttggttaccatcgtaggaaagggatttataaatgctaccaattcaagtgaagattatgaaattgaccaatatgaagagttttgtttttctgtcaggtttaaagcctacccacaaatcagatgtacgtggaccttctctcgaaaatcatttccttgtgagcaaaagggtcttgataacggatacagcatatccaagttttgcaatcataagcaccagccaggagaatatatattccatgcagaaaatgatgatgcccaatttaccaaaatgttcacgctgaatataagaaggaaacctcaagtgctcgcagaagcatcggcaagtcaggcgtcctgtttctcggatggatacccattaccatcttggacctggaagaagtgttcagacaagtctcccaactgcacagaagagatcacagaaggagtctggaatagaaaggctaacagaaaagtgtttggacagtgggtgtcgagcagtactctaaacatgagtgaagccataaaagggttcctggtcaagtgctgtgcatacaattcccttggcacatcttgtgagacgatccttttaaactctccaggccccttccctttcatccaagacaacatctcattctatgcaacaattggtgtttgtctcctcttcattgtcgttttaaccctgctaatttgtcacaagtacaaaaagcaatttaggtatgaaagccagctacagatggtacaggtgaccggctcctcagataatgagtacttctacgttgatttcagagaatatgaatatgatctcaaatgggagtttccaagagaaaatttagagtttgggaaggtactaggatcaggtgcttttggaaaagtgatgaacgcaacagcttatggaattagcaaaacaggagtctcaatccaggttgccgtcaaaatgctgaaagaaaaagcagacagctctgaaagagaggcactcatgtcagaactcaagatgatgacccagctgggaagccacgagaatattgtgaacctgctgggggcgtgcacactgtcaggaccaatttacttgatttttgaatactgttgctatggtgatcttctcaactatctaagaagtaaaagagaaaaatttcacaggacttggacagagattttcaaggaacacaatttcagtttttaccccactttccaatcacatccaaattccagcatgcctggttcaagagaagttcagatacacccggactcggatcaaatctcagggcttcatgggaattcatttcactctgaagatgaaattgaatatgaaaaccaaaaaaggctggaagaagaggaggacttgaatgtgcttacatttgaagatcttctttgctttgcatatcaagttgccaaaggaatggaatttctggaatttaagtcgtgtgttcacagagacctggccgccaggaacgtgcttgtcacccacgggaaagtggtgaagatatgtgactttggattggctcgagatatcatgagtgattccaactatgttgtcaggggcaatgcccgtctgcctgtaaaatggatggcccccgaaagcctgtttgaaggcatctacaccattaagagtgatgtctggtcatatggaatattactgtgggaaatcttctcacttggtgtgaatccttaccctggcattccggttgatgctaacttctacaaactgattcaaaatggatttaaaatggatcagccattttatgctacagaagaaatatacattataatgcaatcctgctgggcttttgactcaaggaaacggccatccttccctaatttgacttcgtttttaggatgtcagctggcagatgcagaagaagcgatgtatcagaatgtggatggccgtgtttcggaatgtcctcacacctaccaaaacaggcgacctttcagcagagagatggatttggggctactctctccgcaggctcaggtcgaagattcgtagaggaacaatttagttttaaggacttcatccctccacctatccctaacaggctgtagattaccaaaacaagattaatttcatcactaaaagaaaatctattatcaactgctgcttcaccagacttttctctagaagccgtctgcgtttactcttgttttcaaagggacttttgtaaaatcaaatcatcctgtcacaaggcaggaggagctgataatgaactttattggagcattgatctgcatccaaggccttctcaggccggcttgagtgaattgtgtacctgaagtacagtatattcttgtaaatacataaaacaaaagcattttgctaaggagaagctaatatgattttttaagtctatgttttaaaataatatgtaaatttttcagctatttagtgatatattttatgggtgggaataaaatttctactacag

SEQ ID NO: 245 - DNA, 6641 bp, Homo sapiens
  ref <308>: DATABASE ACCESSION NUMBER: GenBank No. NM000245
  ref <309>: DATABASE ENTRY DATE: 2004-10-28
gccctcgccgcccgcggcgccccgagcgctttgtgagcagatgcggagccgagtggagggcgcgagccagatgcggggcgacagctgacttgctgagaggaggcggggaggcgcggagcgcgcgtgtggtccttgcgccgctgacttctccactggttcctgggcaccgaaagataaacctctcataatgaaggcccccgctgtgcttgcacctggcatcctcgtgctcctgtttaccttggtgcagaggagcaatggggagtgtaaagaggcactagcaaagtccgagatgaatgtgaatatgaagtatcagcttcccaacttcaccgcggaaacacccatccagaatgtcattctacatgagcatcacattttccttggtgccactaactacatttatgttttaaatgaggaagaccttcagaaggttgctgagtacaagactgggcctgtgctggaacacccagattgtttcccatgtcaggactgcagcagcaaagccaatttatcaggaggtgtttggaaagataacatcaacatggctctagttgtcgacacctactatgatgatcaactcattagctgtggcagcgtcaacagagggacctgccagcgacatgtctttccccacaatcatactgctgacatacagtcggaggttcactgcatattctccccacagatagaagagcccagccagtgtcctgactgtgtggtgagcgccctgggagccaaagtcctttcatctgtaaaggaccggttcatcaacttctttgtaggcaataccataaattcttcttatttcccagatcatccattgcattcgatatcagtgagaaggctaaaggaaacgaaagatggttttatgtttttgacggaccagtcctacattgatgttttacctgagttcagagattcttaccccattaagtatgtccatgcctttgaaagcaacaattttatttacttcttgacggtccaaagggaaactctagatgctcagacttttcacacaagaataatcaggttctgttccataaactctggattgcattcctacatggaaatgcctctggagtgtattctcacagaaaagagaaaaaagagatccacaaagaaggaagtgtttaatatacttcaggctgcgtatgtcagcaagcctggggcccagcttgctagacaaataggagccagcctgaatgatgacattcttttcggggtgttcgcacaaagcaagccagattctgccgaaccaatggatcgatctgccatgtgtgcattccctatcaaatatgtcaacgacttcttcaacaagatcgtcaacaaaaacaatgtgagatgtctccagcatttttacggacccaatcatgagcactgctttaataggacacttctgagaaattcatcaggctgtgaagcgcgccgtgatgaatatcgaacagagtttaccacagctttgcagcgcgttgacttattcatgggtcaattcagcgaagtcctcttaacatctatatccaccttcattaaaggagacctcaccatagctaatcttgggacatcagagggtcgcttcatgcaggttgtggtttctcgatcaggaccatcaacccctcatgtgaattttctcctggactcccatccagtgtctccagaagtgattgtggagcatacattaaaccaaaatggctacacactggttatcactgggaagaagatcacgaagatcccattgaatggcttgggctgcagacatttccagtcctgcagtcaatgcctctctgccccaccctttgttcagtgtggctggtgccacgacaaatgtgtgcgatcggaggaatgcctgagcgggacatggactcaacagatctgtctgcctgcaatctacaaggttttcccaaatagtgcaccccttgaaggagggacaaggctgaccatatgtggctgggactttggatttcggaggaataataaatttgatttaaagaaaactagagttctccttggaaatgagagctgcaccttgactttaagtgagagcacgatgaatacattgaaatgcacagttggtcctgccatgaataagcatttcaatatgtccataattatttcaaatggccacgggacaacacaatacagtacattctcctatgtggatcctgtaataacaagtatttcgccgaaatacggtcctatggctggtggcactttacttactttaactggaaattacctaaacagtgggaattctagacacatttcaattggtggaaaaacatgtactttaaaaagtgtgtcaaacagtattcttgaatgttataccccagcccaaaccatttcaactgagtttgctgttaaattgaaaattgacttagccaaccgagagacaagcatcttcagttaccgtgaagatcccattgtctatgaaattcatccaaccaaatcttttattagtggtgggagcacaataacaggtgttgggaaaaacctgaattcagttagtgtcccgagaatggtcataaatgtgcatgaagcaggaaggaactttacagtggcatgtcaacatcgctctaattcagagataatctgttgtaccactccttccctgcaacagctgaatctgcaactccccctgaaaaccaaagcctttttcatgttagatgggatcctttccaaatactttgatctcatttatgtacataatcctgtgtttaagccttttgaaaagccagtgatgatctcaatgggcaatgaaaatgtactggaaattaagggaaatgatattgaccctgaagcagttaaaggtgaagtgttaaaagttggaaataagagctgtgagaatatacacttacattctgaagccgttttatgcacggtccccaatgacctgctgaaattgaacagcgagctaaatatagagtggaagcaagcaatttcttcaaccgtccttggaaaagtaatagttcaaccagatcagaatttcacaggattgattgctggtgttgtctcaatatcaacagcactgttattactacttgggtttttcctgtggctgaaaaagagaaagcaaattaaagatctgggcagtgaattagttcgctacgatgcaagagtacacactcctcatttggataggcttgtaagtgcccgaagtgtaagcccaactacagaaatggtttcaaatgaatctgtagactaccgagctacttttccagaagatcagtttcctaattcatctcagaacggttcatgccgacaagtgcagtatcctctgacagacatgtcccccatcctaactagtggggactctgatatatccagtccattactgcaaaatactgtccacattgacctcagtgctctaaatccagagctggtccaggcagtgcagcatgtagtgattgggcccagtagcctgattgtgcatttcaatgaagtcataggaagagggcattttggttgtgtatatcatgggactttgttggacaatgatggcaagaaaattcactgtgctgtgaaatccttgaacagaatcactgacataggagaagtttcccaatttctgaccgagggaatcatcatgaaagattttagtcatcccaatgtcctctcgctcctgggaatctgcctgcgaagtgaagggtctccgctggtggtcctaccatacatgaaacatggagatcttcgaaatttcattcgaaatgagactcataatccaactgtaaaagatcttattggctttggtcttcaagtagccaaaggcatgaaatatcttgcaagcaaaaagtttgtccacagagacttggctgcaagaaactgtatgctggatgaaaaattcacagtcaaggttgctgattttggtcttgccagagacatgtatgataaagaatactatagtgtacacaacaaaacaggtgcaaagctgccagtgaagtggatggctttggaaagtctgcaaactcaaaagtttaccaccaagtcagatgtgtggtcctttggcgtgctcctctgggagctgatgacaagaggagccccaccttatcctgacgtaaacacctttgatataactgtttacttgttgcaagggagaagactcctacaacccgaatactgcccagaccccttatatgaagtaatgctaaaatgctggcaccctaaagccgaaatgcgcccatccttttctgaactggtgtcccggatatcagcgatcttctctactttcattggggagcactatgtccatgtgaacgctacttatgtgaacgtaaaatgtgtcgctccgtatccttctctgttgtcatcagaagataacgctgatgatgaggtggacacacgaccagcctccttctgggagacatcatagtgctagtactatgtcaaagcaacagtccacactttgtccaatggttttttcactgcctgacctttaaaaggccatcgatattctttgctcttgccaaaattgcactattataggacttgtattgttatttaaattactggattctaaggaatttcttatctgacagagcatcagaaccagaggcttggtcccacaggccacggaccaatggcctgcagccgtgacaacactcctgtcatattggagtccaaaacttgaattctgggttgaattttttaaaaatcaggtaccacttgatttcatatgggaaattgaagcaggaaatattgagggcttcttgatcacagaaaactcagaagagatagtaatgctcaggacaggagcggcagccccagaacaggccactcatttagaattctagtgtttcaaaacacttttgtgtgttgtatggtcaataacatttttcattactgatggtgtcattcacccattaggtaaacattcccttttaaatgtttgtttgttttttgagacaggatctcactctgttgccagggctgtagtgcagtggtgtgatcatagctcactgcaacctccacctcccaggctcaagcctcccgaatagctgggactacaggcgcacaccaccatccccggctaatttttgtattttttgtagagacggggttttgccatgttgccaaggctggtttcaaactcctggactcaagaaatccacccacctcagcctcccaaagtgctaggattacaggcatgagccactgcgcccagcccttataaatttttgtatagacattcctttggttggaagaatatttataggcaatacagtcaaagtttcaaaatagcatcacacaaaacatgtttataaatgaacaggatgtaatgtacatagatgacattaagaaaatttgtatgaaataatttagtcatcatgaaatatttagttgtcatataaaaacccactgtttgagaatgatgctactctgatctaatgaatgtgaacatgtagatgttttgtgtgtatttttttaaatgaaaactcaaaataagacaagtaatttgttgataaatatttttaaagataactcagcatgtttgtaaagcaggatacattttactaaaaggttcattggttccaatcacagctcataggtagagcaaagaaagggtggatggattgaaaagattagcctctgtctcggtggcaggttcccacctcgcaagcaattggaaacaaaacttttggggagttttattttgcattagggtgtgttttatgttaagcaaaacatactttagaaacaaatgaaaaaggcaattgaaaatcccagctatttcacctagatggaatagccaccctgagcagaactttgtgatgcttcattctgtggaattttgtgcttgctactgtatagtgcatgtggtgtaggttactctaactggttttgtcgacgtaaacatttaaagtgttatattttttataaaaatgtttatttttaatgatatgagaaaaattttgttaggccacaaaaacactgcactgtgaacattttagaaaaggtatgtcagactgggattaatgacagcatgattttcaatgactgtaaattgcgataaggaaatgtactgattgccaatacaccccaccctcattacatcatcaggacttgaagccaagggttaacccagcaagctacaaagagggtgtgtcacactgaaactcaatagttgagtttggctgttgttgcaggaaaatgattataactaaaagctctctgatagtgcagagacttaccagaagacacaaggaattgtactgaagagctattacaatccaaatattgccgtttcataaatgtaataagtaatactaattcacagagtattgtaaatggtggatgacaaaagaaaatctgctctgtggaaagaaagaactgtctctaccagggtcaagagcatgaacgcatcaatagaaagaactcggggaaacatcccatcaacaggactacacacttgtatatacattcttgagaacactgcaatgtgaaaatcacgtttgctatttataaacttgtccttagattaatgtgtctggacagattgtgggagtaagtgattcttctaagaattagatacttgtcactgcctatacctgcagctgaactgaatggtacttcgtatgttaatagttgttctgataaatcatgcaattaaagtaaagtgatgcaacatcttgtaaaaaaaaaaaaaaaaaaaa

SEQ ID NO: 246 - DNA, 6633 bp, Homo sapiens
  ref <308>: DATABASE ACCESSION NUMBER: GenBank No. NM006206
  ref <309>: DATABASE ENTRY DATE: 2004-10-26
ttctccccgccccccagttgttgtcgaagtctgggggttgggactggaccccctgattgcgtaagagcaaaaagcgaaggcgcaatctggacactgggagattcggagcgcagggagtttgagagaaacttttattttgaagagaccaaggttgagggggggcttatttcctgacagctatttacttagagcaaatgattagttttagaaggatggactataacattgaatcaattacaaaacgcggtttttgagcccattactgttggagctacagggagagaaacaggaggagactgcaagagatcatttgggaaggccgtgggcacgctctttactccatgtgtgggacattcattgcggaataacatcggaggagaagtttcccagagctatggggacttcccatccggcgttcctggtcttaggctgtcttctcacagggctgagcctaatcctctgccagctttcattaccctctatccttccaaatgaaaatgaaaaggttgtgcagctgaattcatccttttctctgagatgctttggggagagtgaagtgagctggcagtaccccatgtctgaagaagagagctccgatgtggaaatcagaaatgaagaaaacaacagcggcctttttgtgacggtcttggaagtgagcagtgcctcggcggcccacacagggttgtacacttgctattacaaccacactcagacagaagagaatgagcttgaaggcaggcacatttacatctatgtgccagacccagatgtagcctttgtacctctaggaatgacggattatttagtcatcgtggaggatgatgattctgccattataccttgtcgcacaactgatcccgagactcctgtaaccttacacaacagtgagggggtggtacctgcctcctacgacagcagacagggctttaatgggaccttcactgtagggccctatatctgtgaggccaccgtcaaaggaaagaagttccagaccatcccatttaatgtttatgctttaaaagcaacatcagagctggatctagaaatggaagctcttaaaaccgtgtataagtcaggggaaacgattgtggtcacctgtgctgtttttaacaatgaggtggttgaccttcaatggacttaccctggagaagtgaaaggcaaaggcatcacaatgctggaagaaatcaaagtcccatccatcaaattggtgtacactttgacggtccccgaggccacggtgaaagacagtggagattacgaatgtgctgcccgccaggctaccagggaggtcaaagaaatgaagaaagtcactatttctgtccatgagaaaggtttcattgaaatcaaacccaccttcagccagttggaagctgtcaacctgcatgaagtcaaacattttgttgtagaggtgcgggcctacccacctcccaggatatcctggctgaaaaacaatctgactctgattgaaaatctcactgagatcaccactgatgtggaaaagattcaggaaataaggtatcgaagcaaattaaagctgatccgtgctaaggaagaagacagtggccattatactattgtagctcaaaatgaagatgctgtgaagagctatacttttgaactgttaactcaagttccttcatccattctggacttggtcgatgatcaccatggctcaactgggggacagacggtgaggtgcacagctgaaggcacgccgcttcctgatattgagtggatgatatgcaaagatattaagaaatgtaataatgaaacttcctggactattttggccaacaatgtctcaaacatcatcacggagatccactcccgagacaggagtaccgtggagggccgtgtgactttcgccaaagtggaggagaccatcgccgtgcgatgcctggctaagaatctccttggagctgagaaccgagagctgaagctggtggctcccaccctgcgttctgaactcacggtggctgctgcagtcctggtgctgttggtgattgtgatcatctcacttattgtcctggttgtcatttggaaacagaaaccgaggtatgaaattcgctggagggtcattgaatcaatcagcccggatggacatgaatatatttatgtggacccgatgcagctgccttatgactcaagatgggagtttccaagagatggactagtgcttggtcgggtcttggggtctggagcgtttgggaaggtggttgaaggaacagcctatggattaagccggtcccaacctgtcatgaaagttgcagtgaagatgctaaaacccacggccagatccagtgaaaaacaagctctcatgtctgaactgaagataatgactcacctggggccacatttgaacattgtaaacttgctgggagcctgcaccaagtcaggccccatttacatcatcacagagtattgcttctatggagatttggtcaactatttgcataagaatagggatagcttcctgagccaccacccagagaagccaaagaaagagctggatatctttggattgaaccctgctgatgaaagcacacggagctatgttattttatcttttgaaaacaatggtgactacatggacatgaagcaggctgatactacacagtatgtccccatgctagaaaggaaagaggtttctaaatattccgacatccagagatcactctatgatcgtccagcctcatataagaagaaatctatgttagactcagaagtcaaaaacctcctttcagatgataactcagaaggccttactttattggatttgttgagcttcacctatcaagttgcccgaggaatggagtttttggcttcaaaaaattgtgtccaccgtgatctggctgctcgcaacgtcctcctggcacaaggaaaaattgtgaagatctgtgactttggcctggccagagacatcatgcatgattcgaactatgtgtcgaaaggcagtacctttctgcccgtgaagtggatggctcctgagagcatctttgacaacctctacaccacactgagtgatgtctggtcttatggcattctgctctgggagatcttttcccttggtggcaccccttaccccggcatgatggtggattctactttctacaataagatcaagagtgggtaccggatggccaagcctgaccacgctaccagtgaagtctacgagatcatggtgaaatgctggaacagtgagccggagaagagaccctccttttaccacctgagtgagattgtggagaatctgctgcctggacaatataaaaagagttatgaaaaaattcacctggacttcctgaagagtgaccatcctgctgtggcacgcatgcgtgtggactcagacaatgcatacattggtgtcacctacaaaaacgaggaagacaagctgaaggactgggagggtggtctggatgagcagagactgagcgctgacagtggctacatcattcctctgcctgacattgaccctgtccctgaggaggaggacctgggcaagaggaacagacacagctcgcagacctctgaagagagtgccattgagacgggttccagcagttccaccttcatcaagagagaggacgagaccattgaagacatcgacatgatggacgacatcggcatagactcttcagacctggtggaagacagcttcctgtaactggcggattcgaggggttccttccacttctggggccacctctggatcccgttcagaaaaccactttattgcaatgcggaggttgagaggaggacttggttgatgtttaaagagaagttcccagccaagggcctcggggagcgttctaaatatgaatgaatgggatattttgaaatgaactttgtcagtgttgcctctcgcaatgcctcagtagcatctcagtggtgtgtgaagtttggagatagatggataagggaataataggccacagaaggtgaactttgtgcttcaaggacattggtgagagtccaacagacacaatttatactgcgacagaacttcagcattgtaattatgtaaataactctaaccaaggctgtgtttagattgtattaactatcttctttggacttctgaagagaccactcaatccatccatgtacttccctcttgaaacctgatgtcagctgctgttgaactttttaaagaagtgcatgaaaaaccatttttgaaccttaaaaggtactggtactatagcattttgctatcttttttagtgttaagagataaagaataataattaaccaaccttgtttaatagatttgggtcatttagaagcctgacaactcattttcatattgtaatctatgtttataatactactactgttatcagtaatgctaaatgtgtaataatgtaacatgatttccctccagagaaagcacaatttaaaacaatccttactaagtaggtgatgagtttgacagtttttgacatttatattaaataacatgtttctctataaagtatggtaatagctttagtgaattaaatttagttgagcatagagaacaaagtaaaagtagtgttgtccaggaagtcagaatttttaactgtactgaataggttccccaatccatcgtattaaaaaacaattaactgccctctgaaataatgggattagaaacaaacaaaactcttaagtcctaaaagttctcaatgtagaggcataaacctgtgctgaacataacttctcatgtatattacccaatggaaaatataatgatcagcaaaaagactggatttgcagaagttttttttttttttcttcatgcctgatgaaagctttggcaaccccaatatatgtattttttgaatctatgaacctgaaaagggtcagaaggatgcccagacatcagcctccttctttcaccccttaccccaaagagaaagagtttgaaactcgagaccataaagatattctttagtggaggctggatgtgcattagcctggatcctcagttctcaaatgtgtgtggcagccaggatgactagatcctgggtttccatccttgagattctgaagtatgaagtctgagggaaaccagagtctgtatttttctaaactccctggctgttctgatcggccagttttcggaaacactgacttaggtttcaggaagttgccatgggaaacaaataatttgaactttggaacagggttggaattcaaccacgcaggaagcctactatttaaatccttggcttcaggttagtgacatttaatgccatctagctagcaattgcgaccttaatttaactttccagtcttagctgaggctgagaaagctaaagtttggttttgacaggttttccaaaagtaaagatgctacttcccactgtatgggggagattgaactttccccgtctcccgtcttctgcctcccactccataccccgccaaggaaaggcatgtacaaaaattatgcaattcagtgttccaagtctctgtgtaaccagctcagtgttttggtggaaaaaacattttaagttttactgataatttgaggttagatgggaggatgaattgtcacatctatccacactgtcaaacaggttggtgtgggttcattggcattctttgcaatactgcttaattgctgataccatatgaatgaaacatgggctgtgattactgcaatcactgtgctatcggcagatgatgctttggaagatgcagaagcaataataaagtacttgactacctactggtgtaatctcaatgcaagccccaactttcttatccaactttttcatagtaagtgcgaagactgagccagattggccaattaaaaacgaaaacctgactaggttctgtagagccaattagacttgaaatacgtttgtgtttctagaatcacagctcaagcattctgtttatcgctcactctcccttgtacagccttattttgttggtgctttgcattttgatattgctgtgagccttgcatgacatcatgaggccggatgaaacttctcagtccagcagtttccagtcctaacaaatgctcccacctgaatttgtatatgactgcatttgtgggtgtgtgtgtgttttcagcaaattccagatttgtttccttttggcctcctgcaaagtctccagaagaaaatttgccaatctttcctactttctatttttatgatgacaatcaaagccggcctgagaaacactatttgtgactttttaaacgattagtgatgtccttaaaatgtggtctgccaatctgtacaaaatggtcctatttttgtgaagagggacataagataaaatgatgttatacatcaatatgtatatatgtatttctatatagacttggagaatactgccaaaacatttatgacaagctgtatcactgccttcgtttatatttttttaactgtgataatccccacaggcacattaactgttgcacttttgaatgtccaaaatttatattttagaaataataaaaagaaagatacttacatgttcccaaaacaatggtgtggtgaatgtgtgagaaaaactaacttgatagggtctaccaatacaaaatgtattacgaatgcccctgttcatgtttttgttttaaaacgtgtaaatgaagatctttatatttcaataaatgatatataatttaaagtt

SEQ ID NO: 247 - DNA, 2236 bp, Homo sapiens
  ref <308>: DATABASE ACCESSION NUMBER: GenBank No. NM001065
  ref <309>: DATABASE ENTRY DATE: 2004-10-27
gctgttgcaacactgcctcactcttcccctcccaccttctctcccctcctctctgctttaattttctcagaattctctggactgaggctccagttctggcctttggggttcaagatcactgggaccaggccgtgatctctatgcccgagtctcaaccctcaactgtcaccccaaggcacttgggacgtcctggacagaccgagtcccgggaagccccagcactgccgctgccacactgccctgagcccaaatgggggagtgagaggccatagctgtctggcatgggcctctccaccgtgcctgacctgctgctgccactggtgctcctggagctgttggtgggaatatacccctcaggggttattggactggtccctcacctaggggacagggagaagagagatagtgtgtgtccccaaggaaaatatatccaccctcaaaataattcgatttgctgtaccaagtgccacaaaggaacctacttgtacaatgactgtccaggcccggggcaggatacggactgcagggagtgtgagagcggctccttcaccgcttcagaaaaccacctcagacactgcctcagctgctccaaatgccgaaaggaaatgggtcaggtggagatctcttcttgcacagtggaccgggacaccgtgtgtggctgcaggaagaaccagtaccggcattattggagtgaaaaccttttccagtgcttcaattgcagcctctgcctcaatgggaccgtgcacctctcctgccaggagaaacagaacaccgtgtgcacctgccatgcaggtttctttctaagagaaaacgagtgtgtctcctgtagtaactgtaagaaaagcctggagtgcacgaagttgtgcctaccccagattgagaatgttaagggcactgaggactcaggcaccacagtgctgttgcccctggtcattttctttggtctttgccttttatccctcctcttcattggtttaatgtatcgctaccaacggtggaagtccaagctctactccattgtttgtgggaaatcgacacctgaaaaagagggggagcttgaaggaactactactaagcccctggccccaaacccaagcttcagtcccactccaggcttcacccccaccctgggcttcagtcccgtgcccagttccaccttcacctccagctccacctatacccccggtgactgtcccaactttgcggctccccgcagagaggtggcaccaccctatcagggggctgaccccatccttgcgacagccctcgcctccgaccccatccccaacccccttcagaagtgggaggacagcgcccacaagccacagagcctagacactgatgaccccgcgacgctgtacgccgtggtggagaacgtgcccccgttgcgctggaaggaattcgtgcggcgcctagggctgagcgaccacgagatcgatcggctggagctgcagaacgggcgctgcctgcgcgaggcgcaatacagcatgctggcgacctggaggcggcgcacgccgcggcgcgaggccacgctggagctgctgggacgcgtgctccgcgacatggacctgctgggctgcctggaggacatcgaggaggcgctttgcggccccgccgccctcccgcccgcgcccagtcttctcagatgaggctgcgcccctgcgggcagctctaaggaccgtcctgcgagatcgccttccaaccccacttttttctggaaaggaggggtcctgcaggggcaagcaggagctagcagccgcctacttggtgctaacccctcgatgtacatagcttttctcagctgcctgcgcgccgccgacagtcagcgctgtgcgcgcggagagaggtgcgccgtgggctcaagagcctgagtgggtggtttgcgaggatgagggacgctatgcctcatgcccgttttgggtgtcctcaccagcaaggctgctcgggggcccctggttcgtccctgagcctttttcacagtgcataagcagttttttttgtttttgttttgttttgttttgtttttaaatcaatcatgttacactaatagaaacttggcactcctgtgccctctgcctggacaagcacatagcaagctgaactgtcctaaggcaggggcgagcacggaacaatggggccttcagctggagctgtggacttttgtacatacactaaaattctgaagttaaagctctgctcttggaaaaaaaaaaaaaaaaaaaaaaaaaaaaaaaaa

SEQ ID NO: 248 - DNA, 5830 bp, Homo sapiens
  ref <308>: DATABASE ACCESSION NUMBER: GenBank No. NM002253
  ref <309>: DATABASE ENTRY DATE: 2004-10-26
actgagtcccgggaccccgggagagcggtcagtgtgtggtcgctgcgtttcctctgcctgcgccgggcatcacttgcgcgccgcagaaagtccgtctggcagcctggatatcctctcctaccggcacccgcagacgcccctgcagccgccggtcggcgcccgggctccctagccctgtgcgctcaactgtcctgcgctgcggggtgccgcgagttccacctccgcgcctccttctctagacaggcgctgggagaaagaaccggctcccgagttctgggcatttcgcccggctcgaggtgcaggatgcagagcaaggtgctgctggccgtcgccctgtggctctgcgtggagacccgggccgcctctgtgggtttgcctagtgtttctcttgatctgcccaggctcagcatacaaaaagacatacttacaattaaggctaatacaactcttcaaattacttgcaggggacagagggacttggactggctttggcccaataatcagagtggcagtgagcaaagggtggaggtgactgagtgcagcgatggcctcttctgtaagacactcacaattccaaaagtgatcggaaatgacactggagcctacaagtgcttctaccgggaaactgacttggcctcggtcatttatgtctatgttcaagattacagatctccatttattgcttctgttagtgaccaacatggagtcgtgtacattactgagaacaaaaacaaaactgtggtgattccatgtctcgggtccatttcaaatctcaacgtgtcactttgtgcaagatacccagaaaagagatttgttcctgatggtaacagaatttcctgggacagcaagaagggctttactattcccagctacatgatcagctatgctggcatggtcttctgtgaagcaaaaattaatgatgaaagttaccagtctattatgtacatagttgtcgttgtagggtataggatttatgatgtggttctgagtccgtctcatggaattgaactatctgttggagaaaagcttgtcttaaattgtacagcaagaactgaactaaatgtggggattgacttcaactgggaatacccttcttcgaagcatcagcataagaaacttgtaaaccgagacctaaaaacccagtctgggagtgagatgaagaaatttttgagcaccttaactatagatggtgtaacccggagtgaccaaggattgtacacctgtgcagcatccagtgggctgatgaccaagaagaacagcacatttgtcagggtccatgaaaaaccttttgttgcttttggaagtggcatggaatctctggtggaagccacggtgggggagcgtgtcagaatccctgcgaagtaccttggttacccacccccagaaataaaatggtataaaaatggaataccccttgagtccaatcacacaattaaagcggggcatgtactgacgattatggaagtgagtgaaagagacacaggaaattacactgtcatccttaccaatcccatttcaaaggagaagcagagccatgtggtctctctggttgtgtatgtcccaccccagattggtgagaaatctctaatctctcctgtggattcctaccagtacggcaccactcaaacgctgacatgtacggtctatgccattcctcccccgcatcacatccactggtattggcagttggaggaagagtgcgccaacgagcccagccaagctgtctcagtgacaaacccatacccttgtgaagaatggagaagtgtggaggacttccagggaggaaataaaattgaagttaataaaaatcaatttgctctaattgaaggaaaaaacaaaactgtaagtacccttgttatccaagcggcaaatgtgtcagctttgtacaaatgtgaagcggtcaacaaagtcgggagaggagagagggtgatctccttccacgtgaccaggggtcctgaaattactttgcaacctgacatgcagcccactgagcaggagagcgtgtctttgtggtgcactgcagacagatctacgtttgagaacctcacatggtacaagcttggcccacagcctctgccaatccatgtgggagagttgcccacacctgtttgcaagaacttggatactctttggaaattgaatgccaccatgttctctaatagcacaaatgacattttgatcatggagcttaagaatgcatccttgcaggaccaaggagactatgtctgccttgctcaagacaggaagaccaagaaaagacattgcgtggtcaggcagctcacagtcctagagcgtgtggcacccacgatcacaggaaacctggagaatcagacgacaagtattggggaaagcatcgaagtctcatgcacggcatctgggaatccccctccacagatcatgtggtttaaagataatgagacccttgtagaagactcaggcattgtattgaaggatgggaaccggaacctcactatccgcagagtgaggaaggaggacgaaggcctctacacctgccaggcatgcagtgttcttggctgtgcaaaagtggaggcatttttcataatagaaggtgcccaggaaaagacgaacttggaaatcattattctagtaggcacggcggtgattgccatgttcttctggctacttcttgtcatcatcctacggaccgttaagcgggccaatggaggggaactgaagacaggctacttgtccatcgtcatggatccagatgaactcccattggatgaacattgtgaacgactgccttatgatgccagcaaatgggaattccccagagaccggctgaagctaggtaagcctcttggccgtggtgcctttggccaagtgattgaagcagatgcctttggaattgacaagacagcaacttgcaggacagtagcagtcaaaatgttgaaagaaggagcaacacacagtgagcatcgagctctcatgtctgaactcaagatcctcattcatattggtcaccatctcaatgtggtcaaccttctaggtgcctgtaccaagccaggagggccactcatggtgattgtggaattctgcaaatttggaaacctgtccacttacctgaggagcaagagaaatgaatttgtcccctacaagaccaaaggggcacgattccgtcaagggaaagactacgttggagcaatccctgtggatctgaaacggcgcttggacagcatcaccagtagccagagctcagccagctctggatttgtggaggagaagtccctcagtgatgtagaagaagaggaagctcctgaagatctgtataaggacttcctgaccttggagcatctcatctgttacagcttccaagtggctaagggcatggagttcttggcatcgcgaaagtgtatccacagggacctggcggcacgaaatatcctcttatcggagaagaacgtggttaaaatctgtgactttggcttggcccgggatatttataaagatccagattatgtcagaaaaggagatgctcgcctccctttgaaatggatggccccagaaacaatttttgacagagtgtacacaatccagagtgacgtctggtcttttggtgttttgctgtgggaaatattttccttaggtgcttctccatatcctggggtaaagattgatgaagaattttgtaggcgattgaaagaaggaactagaatgagggcccctgattatactacaccagaaatgtaccagaccatgctggactgctggcacggggagcccagtcagagacccacgttttcagagttggtggaacatttgggaaatctcttgcaagctaatgctcagcaggatggcaaagactacattgttcttccgatatcagagactttgagcatggaagaggattctggactctctctgcctacctcacctgtttcctgtatggaggaggaggaagtatgtgaccccaaattccattatgacaacacagcaggaatcagtcagtatctgcagaacagtaagcgaaagagccggcctgtgagtgtaaaaacatttgaagatatcccgttagaagaaccagaagtaaaagtaatcccagatgacaaccagacggacagtggtatggttcttgcctcagaagagctgaaaactttggaagacagaaccaaattatctccatcttttggtggaatggtgcccagcaaaagcagggagtctgtggcatctgaaggctcaaaccagacaagcggctaccagtccggatatcactccgatgacacagacaccaccgtgtactccagtgaggaagcagaacttttaaagctgatagagattggagtgcaaaccggtagcacagcccagattctccagcctgactcggggaccacactgagctctcctcctgtttaaaaggaagcatccacaccccaactcccggacatcacatgagaggtctgctcagattttgaagtgttgttctttccaccagcaggaagtagccgcatttgattttcatttcgacaacagaaaaaggacctcggactgcagggagccagtcttctaggcatatcctggaagaggcttgtgacccaagaatgtgtctgtgtcttctcccagtgttgacctgatcctcttttttcattcatttaaaaagcattatcatgcccctgctgcgggtctcaccatgggtttagaacaaagagcttcaagcaatggccccatcctcaaagaagtagcagtacctggggagctgacacttctgtaaaactagaagataaaccaggcaacgtaagtgttcgaggtgttgaagatgggaaggatttgcagggctgagtctatccaagaggctttgtttaggacgtgggtcccaagccaagccttaagtgtggaattcggattgatagaaaggaagactaacgttaccttgctttggagagtactggagcctgcaaatgcattgtgtttgctctggtggaggtgggcatggggtctgttctgaaatgtaaagggttcagacggggtttctggttttagaaggttgcgtgttcttcgagttgggctaaagtagagttcgttgtgctgtttctgactcctaatgagagttccttccagaccgttagctgtctccttgccaagccccaggaagaaaatgatgcagctctggctccttgtctcccaggctgatcctttattcagaataccacaaagaaaggacattcagctcaaggctccctgccgtgttgaagagttctgactgcacaaaccagcttctggtttcttctggaatgaataccctcatatctgtcctgatgtgatatgtctgagactgaatgcgggaggttcaatgtgaagctgtgtgtggtgtcaaagtttcaggaaggattttacccttttgttcttccccctgtccccaacccactctcaccccgcaacccatcagtattttagttatttggcctctactccagtaaacctgattgggtttgttcactctctgaatgattattagccagacttcaaaattattttatagcccaaattataacatctattgtattatttagacttttaacatatagagctatttctactgatttttgcccttgttctgtcctttttttcaaaaaagaaaatgtgttttttgtttggtaccatagtgtgaaatgctgggaacaatgactataagacatgctatggcacatatatttatagtctgtttatgtagaaacaaatgtaatatattaaagccttatatataatgaactttgtactattcacattttgtatcagtattatgtagcataacaaaggtcataatgctttcagcaattgatgtcattttattaaagaacattgaaaaacttga

SEQ ID NO: 249 - protein, 972 aa, Homo sapiens
  ref <308>: DATABASE ACCESSION NUMBER: GenBank No. NP005202
  ref <309>: DATABASE ENTRY DATE: 2004-10-26
MGPGVLLLLLVATAWHGQGIPVIEPSVPELVVKPGATVTLRCVGNGSVEWDGPPSPHWTLYSDGSSSILSTNNATFQNTGTYRCTEPGDPLGGSAAIHLYVKDPARPWNVLAQEVVVFEDQDALLPCLLTDPVLEAGVSLVRVRGRPLMRHTNYSFSPWHGFTIHRAKFIQSQDYQCSALMGGRKVMSISIRLKVQKVIPGPPALTLVPAELVRIRGEAAQIVCSASSVDVNFDVFLQHNNTKLAIPQQSDFHNNRYQKVLTLNLDQVDFQHAGNYSCVASNVQGKHSTSMFFRVVESAYLNLSSEQNLIQEVTVGEGLNLKVMVEAYPGLQGFNWTYLGPFSDHQPEPKLANATTKDTYRHTFTLSLPRLKPSEAGRYSFLARNPGGWRALTFELTLRYPPEVSVIWTFINGSGTLLCAASGYPQPNVTWLQCSGHTDRCDEAQVLQVWDDPYPEVLSQEPFHKVTVQSLLTVETLEHNQTYECRAHNSVGSGSWAFIPISAGAHTHPPDEFLFTPVVVACMSIMALLLLLLLLLLYKYKQKPKYQVRWKIIESYEGNSYTFIDPTQLPYNEKWEFPRNNLQFGKTLGAGAFGKVVEATAFGLGKEDAVLKVAVKMLKSTAHADEKEALMSELKIMSHLGQHENIVNLLGACTHGGPVLVITEYCCYGDLLNFLRRKAEAMLGPSLSPGQDPEGGVDYKNIHLEKKYVRRDSGFSSQGVDTYVEMRPVSTSSNDSFSEQDLDKEDGRPLELRDLLHFSSQVAQGMAFLASKNCIHRDVAARNVLLTNGHVAKIGDFGLARDIMNDSNYIVKGNARLPVKWMAPESIFDCVYTVQSDVWSYGILLWEIFSLGLNPYPGILVNSKFYKLVKDGYQMAQPAFAPKNIYSIMQACWALEPTHRPTFQQICSFLQEQAQEDRRERDYTNLPSSSRSGGSGSSSSELEEESSSEHLTCCEQGDIAQPLLQPNNYQFC

SEQ ID NO: 250 - protein, 913 aa, Homo sapiens
  ref <308>: DATABASE ACCESSION NUMBER: GenBank No. NP054699
  ref <309>: DATABASE ENTRY DATE: 2004-10-26
MGPEALSSLLLLLLVASGDADMKGHFDPAKCRYALGMQDRTIPDSDISASSSWSDSTAARHSRLESSDGDGAWCPAGSVFPKEEEYLQVDLQRLHLVALVGTQGRHAGGLGKEFSRSYRLRYSRDGRRWMGWKDRWGQEVISGNEDPEGVVLKDLGPPMVARLVRFYPRADRVMSVCLRVELYGCLWRDGLLSYTAPVGQTMYLSEAVYLNDSTYDGHTVGGLQYGGLGQLADGVVGLDDFRKSQELRVWPGYDYVGWSNHSFSSGYVEMEFEFDRLRAFQAMQVHCNNMHTLGARLPGGVECRFRRGPAMAWEGEPMRHNLGGNLGDPRARAVSVPLGGRVARFLQCRFLFAGPWLLFSEISFISDVVNNSSPALGGTFPPAPWWPPGPPPTNFSSLELEPRGQQPVAKAEGSPTAILIGCLVAIILLLLLIIALMLWRLHWRRLLSKAERRVLEEELTVHLSVPGDTILINNRPGPREPPPYQEPRPRGNPPHSAPCVPNGSALLLSNPAYRLLLATYARPPRGPGPPTPAWAKPTNTQAYSGDYMEPEKPGAPLLPPPPQNSVPHYAEADIVTLQGVTGGNTYAVPALPPGAVGDGPPRVDFPRSRLRFKEKLGEGQFGEVHLCEVDSPQDLVSLDFPLNVRKGHPLLVAVKILRPDATKNARNDFLKEVKIMSRLKDPNIIRLLGVCVQDDPLCMITDYMENGDLNQFLSAHQLEDKAAEGAPGDGQAAQGPTISYPMLLHVAAQIASGMRYLATLNFVHRDLATRNCLVGENFTIKIADFGMSRNLYAGDYYRVQGRAVLPIRWMAWECILMGKFTTASDVWAFGVTLWEVLMLCRAQPFGSAHRRAGHRERGGVLPGPGPAVYLSRPPACPQGLYELMLRCWSRESEQRPPFSQLHRFLAEDALNTV

SEQ ID NO: 251 - protein, 855 aa, Homo sapiens
  ref <308>: DATABASE ACCESSION NUMBER: GenBank No. NP006173
  ref <309>: DATABASE ENTRY DATE: 2004-10-26
MILIPRMLLVLFLLLPILSSAKAQVNPAICRYPLGMSGGQIPDEDITASSQWSESTAAKYGRLDSEEGDGAWCPEIPVEPDDLKEFLQIDLHTLHFITLVGTQGRHAGGHGIEFAPMYKINYSRDGTRWISWRNRHGKQVLDGNSNPYDIFLKDLEPPIVARFVRFIPVTDHSMNVCMRVELYGCVWLDGLVSYNAPAGQQFVLPGGSIIYLNDSVYDGAVGYSMTEGLGQLTDGVSGLDDFTQTHEYHVWPGYDYVGWRNESATNGYIEIMFEFDRIRNFTTMKVHCNNMFAKGVKIFKEVQCYFRSEASEWEPNAISFPLVLDDVNPSARFVTVPLHHRMASAIKCQYHFADTWMMFSEITFQSDAAMYNNSEALPTSPMAPTTYDPMLKVDDSNTRILIGCLVAIIFILLAIIVIILWRQFWQKMLEKASRRMLDDEMTVSLSLPSDSSMFNNNRSSSPSEQGSNSTYDRIFPLRPDYQEPSRLIRKLPEFAPGEEESGCSGVVKPVQPSGPEGVPHYAEADIVNLQGVTGGNTYSVPAVTMDLLSGKDVAVEEFPRKLLTFKEKLGEGQFGEVHLCEVEGMEKFKDKDFALDVSANQPVLVAVKMLRADANKNARNDFLKEIKIMSRLKDPNIIHLLSVCITDDPLCMITEYMENGDLNQFLSRHEPPNSSSSDVRTVSYTNLKFMATQIASGMKYLSSLNFVHRDLATRNCLVGKNYTIKIADFGMSRNLYSGDYYRIQGRAVLPIRWMSWESILLGKFTTASDVWAFGVTLWETFTFCQEQPYSQLSDEQVIENTGEFFRDQGRQTYLPQPAICPDSVYKLMLSCWRRDTKNRPSFQEIHLLLLQQGDE

SEQ ID NO: 252 - protein, 1210 aa, Homo sapiens [sequence omitted]

SEQ ID NO: 253 - protein, 976 aa, Homo sapiens
  ref <308>: DATABASE ACCESSION NUMBER: GenBank No. NP005223
  ref <309>: DATABASE ENTRY DATE: 2004-11-29
MERRWPLGLGLVLLLCAPLPPGARAKEVTLMDTSKAQGELGWLLDPPKDGWSEQQQILNGTPLYMYQDCPMQGRRDTDHWLRSNWIYRGEEASRVHVELQFTVRDCKSFPGGAGPLGCKETFNLLYMESDQDVGIQLRRPLFQKVTTVAADQSFTIRDLASGSVKLNVERCSLGRLTRRGLYLAFHNPGACVALVSVRVFYQRCPETLNGLAQFPDTLPGPAGLVEVAGTCLPHARASPRPSGAPRMHCSPDGEWLVPVGRCHCEPGYEEGGSGEACVACPSGSYRMDMDTPHCLTCPQQSTAESEGATICTCESGHYRAPGEGPQVACTGPPSAPRNLSFSASGTQLSLRWEPPADTGGRQDVRYSVRCSQCQGTAQDGGPCQPCGVGVHFSPGARGLTTPAVHVNGLEPYANYTFNVEAQNGVSGLGSSGHASTSVSISMGHAESLSGLSLRLVKKEPRQLELTWAGSRPRSPGANLTYELHVLNQDEERYQMVLEPRVLLTELQPDTTYIVRVRMLTPLGPGPFSPDHEFRTSPPVSRGLTGGEIVAVIFGLLLGAALLLGILVFRSRRAQRQRQQRQRDRATDVDREDKLWLKPYVDLQAYEDPAQGALDFTRELDPAWLMVDTVIGEGEFGEVYRGTLRLPSQDCKTVAIKTLKDTSPGGQWWNFLREATIMGQFSHPHILHLEGVVTKRKPIMIITEFMENGALDAFLREREDQLVPGQLVAMLQGIASGMNYLSNHNYVHRDLAARNILVNQNLCCKVSDFGLTRLLDDFDGTYETQGGKIPIRWTAPEAIAHRIFTTASDVWSFGIVMWEVLSFGDKPYGEMSNQEVMKSIEDGYRLPPPVDCPAPLYELMKNCWAYDRARRPHFQKLQAHLEQLLANPHSLRTIANFDPRMTLRLPSLSGSDGIPYRTVSEWLESIRMKRYILHFHSAGLDTMECVLELTAEDLTQMGITLPGHQKRILCSIQGFKD

SEQ ID NO: 254 - protein, 976 aa, Homo sapiens
  ref <308>: DATABASE ACCESSION NUMBER: GenBank No. NP004422
  ref <309>: DATABASE ENTRY DATE: 2004-12-20
MELQAARACFALLWGCALAAAAAAQGKEVVLLDFAAAGGELGWLTHPYGKGWDLMQNIMNDMPIYMYSVCNVMSGDQDNWLRTNWVYRGEAERIFIELKFTVRDCNSFPGGASSCKETFNLYYAESDLDYGTNFQKRLFTKIDTIAPDEITVSSDFEARHVKLNVEERSVGPLTRKGFYLAFQDIGACVALLSVRVYYKKCPELLQGLAHFPETIAGSDAPSLATVAGTCVDHAVVPPGGEEPRMHCAVDGEWLVPIGQCLCQAGYEKVEDACQACSPGFFKFEASESPCLECPEHTLPSPEGATSCECEEGFFRAPQDPASMPCTRPPSAPHYLTAVGMGAKVELRWTPPQDSGGREDIVYSVTCEQCWPESGECGPCEASVRYSEPPHGLTRTSVTVSDLEPHMNYTFTVEARNGVSGLVTSRSFRTASVSINQTEPPKVRLEGRSTTSLSVSWSIPPPQQSRVWKYEVTYRKKGDSNSYNVRRTEGFSVTLDDLAPDTTYLVQVQALTQEGQGAGSKVHEFQTLSPEGSGNLAVIGGVAVGVVLLLVLAGVGFFIHRRRKNQRARQSPEDVYFSKSEQLKPLKTYVDPHTYEDPNQAVLKFTTEIHPSCVTRQKVIGAGEFGEVYKGMLKTSSGKKEVPVAIKTLKAGYTEKQRVDFLGEAGIMGQFSHHNIIRLEGVISKYKPMMIITEYMENGALDKFLREKDGEFSVLQLVGMLRGIAAGMKYLANMNYVHRDLAARNILVNSNLVCKVSDFGLSRVLEDDPEATYTTSGGKIPIRWTAPEAISYRKFTSASDVWSFGIVMWEVMTYGERPYWELSNHEVMKAINDGFRLPTPMDCPSAIYQLMMQCWQQERARRPKFADIVSILDKLIRAPDSLKTLADFDPRVSIRLPSTSGSEGVPFRTVSEWLESIKMQQYTEHFMAAGYTAIEKVVQMTNDDIKRIGVRLPGHQKRIAYSLLGLKDQVNTVGIPI

SEQ ID NO: 255 - protein, 983 aa, Homo sapiens
  ref <308>: DATABASE ACCESSION NUMBER: GenBank No. NP005224
  ref <309>: DATABASE ENTRY DATE: 2004-11-16
MDCQLSILLLLSCSVLDSFGELIPQPSNEVNLLDSKTIQGELGWISYPSHGWEEISGVDEHYTPIRTYQVCNVMDHSQNNWLRTNWVPRNSAQKIYVELKFTLRDCNSIPLVLGTCKETFNLYYMESDDDHGVKFREHQFTKIDTIAADESFTQMDLGDRILKLNTEIREVGPVNKKGFYLAFQDVGACVALVSVRVYFKKCPFTVKNLAMFPDTVPMDSQSLVEVRGSCVNNSKEEDPPRMYCSTEGEWLVPIGKCSCNAGYEERGFMCQACRPGFYKALDGNMKCAKCPPHSSTQEDGSMNCRCENNYFRADKDPPSMACTRPPSSPRNVISNINETSVILDWSWPLDTGGRKDVTFNIICKKCGWNIKQCEPCSPNVRFLPRQFGLTNTTVTVTDLLAHTNYTFEIDAVNGVSELSSPPRQFAAVSITTNQAAPSPVLTIKKDRTSRNSISLSWQEPEHPNGIILDYEVKYYEKQEQETSYTILRARGTNVTISSLKPDTIYVFQIRARTAAGYGTNSRKFEFETSPDSFSISGESSQVVMIAISAAVAIILLTVVIYVLIGRFCGYKSKHGADEKRLHFGNGHLKLPGLRTYVDPHTYEDPTQAVHEFAKELDATNISIDKVVGAGEFGEVCSGRLKLPSKKEISVAIKTLKVGYTEKQRRDFLGEASIMGQFDHPNIIRLEGVVTKSKPVMIVTEYMENGSLDSFLRKHDAQFTVIQLVGMLRGIASGMKYLSDMGYVHRDLAARNILINSNLVCKVSDFGLSRVLEDDPEAAYTTRGGKIPIRWTSPEAIAYRKFTSASDVWSYGIVLWEVMSYGERPYWEMSNQDVIKAVDEGYRLPPPMDCPAALYQLMLDCWQKDRNNRPKFEQIVSILDKLIRNPGSLKIITSAAARPSNLLLDQSNVDITTFRTTGDWLNGVWTAHCKEIFTGVEYSSCDTIAKISTDDMKKVGVTVVGPQKKIISSIKALETQSKNGPVPV

SEQ ID NO: 256 - protein, 986 aa, Homo sapiens
  ref <308>: DATABASE ACCESSION NUMBER: GenBank No. NP004429
  ref <309>: DATABASE ENTRY DATE: 2004-11-16
MAGIFYFALFSCLFGICDAVTGSRVYPANEVTLLDSRSVQGELGWIASPLEGGWEEVSIMDEKNTPIRTYQVCNVMEPSQNNWLRTDWITREGAQRVYIEIKFTLRDCNSLPGVMGTCKETFNLYYYESDNDKERFIRENQFVKIDTIAADESFTQVDIGDRIMKLNTEIRDVGPLSKKGFYLAFQDVGACIALVSVRVFYKKCPLTVRNLAQFPDTITGADTSSLVEVRGSCVNNSEEKDVPKMYCGADGEWLVPIGNCLCNAGHEERSGECQACKIGYYKALSTDATCAKCPPHSYSVWEGATSCTCDRGFFRADNDAASMPCTRPPSAPLNLISNVNETSVNLEWSSPQNTGGRQDISYNVVCKKCGAGDPSKCRPCGSGVHYTPQQNGLKTTKVSITDLLAHTNYTFEIWAVNGVSKYNPNPDQSVSVTVTTNQAAPSSIALVQAKEVTRYSVALAWLEPDRPNGVILEYEVKYYEKDQNERSYRIVRTAARNTDIKGLNPLTSYVFHVRARTAAGYGDFSEPLEVTTNTVPSRIIGDGANSTVLLVSVSGSVVLVVILIAAFVISRRRSKYSKAKQEADEEKHLNQGVRTYVDPFTYEDPNQAVREFAKEIDASCIKIEKVIGVGEFGEVCSGRLKVPGKREICVAIKTLKAGYTDKQRRDFLSEASIMGQFDHPNIIHLEGVVTKCKPVMIITEYMENGSLDAFLRKNDGRFTVIQLVGMLRGIGSGMKYLSDMSYVHRDLAARNILVNSNLVCKVSDFGMSRVLEDDPEAAYTTRGGKIPIRWTAPEAIAYRKFTSASDVWSYGIVMWEVMSYGERPYWDMSNQDVIKAIEEGYRLPPPMDCPIALHQLMLDCWQKERSDRPKFGQIVNMLDKLIRNPNSLKRTGTESSRPNTALLDPSSPEFSAVVSVGDWLQAIKMDRYKDNFTAAGYTTLEAVVHVNQEDLARIGITAITHQNKILSSVQAMRTQMQQMHGRMVPV

SEQ ID NO: 257 - protein, 991 aa, Homo sapiens
  ref <308>: DATABASE ACCESSION NUMBER: GenBank No. AAA74245
  ref <309>: DATABASE ENTRY DATE: 1995-08-10
PASLAGCYSAPRRAPLWTCLLLCAALRTLLASPSNEVNLLDSRTVMGDLGWIAFPKNGWEEIGEVDENYAPIHTYQVCKVMEQNQNNWLLTSWISNEGASRIFIELKFTLRDCNSLPGGLGTCKETFNMYYFESDDQNGRNIKENQYIKIDTIAADESFTELDLGDRVMKLNTEVRDVGPLSKKGFYLAFQDVGACIALVSVRVYYKKCPSVVRHLAVFPDTITGADSSQLLEVSGSCVNHSVTDEPPKMHCSAEGEWLVPIGKCMCKAGYEEKNGTCQVCRPGFFKASPHIQSCGKCPPHSYTHEEASTSCVCEKDYFRRESDPPTMACTRPPSAPRNAISNVNETSVFLEWIPPADTGGRKDVSYYIACKKCNSHAGVCEECGGHVRYLPRQSGLKNTSVMMVDLLAHTNYTFEIEAVNGVSDLSPGARQYVSVNVTTNQAAPSPVTNVKKGKIAKNSISLSWQEPDRPNGIILEYEIKHFEKDQETSYTIIKSKETTITAEGLKPASVYVFQIRARTAAGYGVFSRRFEFETTPVFAASSDQSQIPVIAVSVTVGVILLAVVIGVLLSGRRCGYSKAKQDPEEEKMHFHNGHIKLPGVRTYIDPHTYEDPNQAVHEFAKEIEASCITIERVIGAGEFGEVCSGRLKLPGKRELPVAIKTLKVGYTEKQRRDFLGEASIMGQFDHPNIIHLEGVVTKSKPVMIVTEYMENGSLDTFLKKNDGQFTVIQLVGMLRGISAGMKYLSDMGYVHRDLAARNILINSNLVCKVSDFGLSRVLEDDPEAAYTTRGGKIPIRWTAPEAIAFRKFTSASDVWSYGIVMWEVVSYGERPYWEMTNQDVIKAVEEGYRLPSPMDCPAALYQLMLDCWQKERNSRPKFDEIVNMLDKLIRNPSSLKTLVNASCRVSNLLAEHSPLGSGAYRSVGEWLEAIKMGRYTEIFMENGYSSMDAVAQVTLEDLRRLGVTLVGHQKKIMNSLQEMKVQLVNGMVPL

SEQ ID NO: 258 - protein, 334 aa, Homo sapiens
  ref <308>: DATABASE ACCESSION NUMBER: GenBank No. CAB63775
  ref <309>: DATABASE ENTRY DATE: 2005-01-20
MKDSPFQVTKLYWLNEKWDFIASASDMAAEQGQILVIATAAVGGFTLLVILTLFFLITGRCQWYIKAKMKSEEKRRNHLQNGHLRFPGIKTYIDPDTYEDPSLAVHEFAKEIDPSRIRIERVIGAGEFGEVCSGRLKTPGKREIPVAIKTLKGGHMDRQRRDFLREASIMGQFDHPNIIRLEGVVTKRSFPAIGVEAFCPSFLRAGFLNSIQAPHPVPGGGSLPPRIPAGRPVMIVVEYMENGSLDSFLRKHDGHFTVIQLVGMLRGIASGMKYLSDMGYVHRDLAARNILVNSNLVCKVSDFGLSRVLEDDPEAAYTTTDLFQTLTLNLCYSA

SEQ ID NO: 259 - protein, 998 aa, Homo sapiens
  ref <308>: DATABASE ACCESSION NUMBER: GenBank No. NP004431
  ref <309>: DATABASE ENTRY DATE: 2005-01-26
MVFQTRYPSWIILCYIWLLRFAHTGEAQAAKEVLLLDSKAQQTELEWISSPPNGWEEISGLDENYTPIRTYQVCQVMEPNQNNWLRTNWISKGNAQRIFVELKFTLRDCNSLPGVLGTCKETFNLYYYETDYDTGRNIRENLYVKIDTIAADESFTQGDLGERKMKLNTEVREIGPLSKKGFYLAFQDVGACIALVSVKVYYKKCWSIIENLAIFPDTVTGSEFSSLVEVRGTCVSSAEEEAENAPRMHCSAEGEWLVPIGKCICKAGYQQKGDTCEPCGRGFYKSSSQDLQCSRCPTHSFSDKEGSSRCECEDGYYRAPSDPPYVACTRPPSAPQNLIFNINQTTVSLEWSPPADNGGRNDVTYRILCKRCSWEQGECVPCGSNIGYMPQQTGLEDNYVTVMDLLAHANYTFEVEAVNGVSDLSRSQRLFAAVSITTGQAAPSQVSGVMKERVLQRSVELSWQEPEHPNGVITEYEIKYYEKDQRERTYSTVKTKSTSASINNLKPGTVYVFQIRAFTAAGYGNYSPRLDVATLEEATGKMFEATAVSSEQNPVIIIAVVAVAGTIILVFMVFGFIIGRRHCGYSKADQEGDEELYFHFKFPGTKTYIDPETYEDPNRAVHQFAKELDASCIKIERVIGAGEFGEVCSGRLKLPGKRDVAVAIKTLKVGYTEKQRRDFLCEASIMGQFDHPNVVHLEGVVTRGKPVMIVIEFMENGALDAFLRKHDGQFTVIQLVGMLRGIAAGMRYLADMGYVHRDLAARNILVNSNLVCKVSDFGLSRVIEDDPEAVYTTTGGKIPVRWTAPEAIQYRKFTSASDVWSYGIVMWEVMSYGERPYWDMSNQDVIKAIEEGYRLPAPMDCPAGLHQLMLDCWQKERAERPKFEQIVGILDKMIRNPNSLKTPLGTCSRPISPLLDQNTPDFTTFCSVGEWLQAIKMERYKDNFTAAGYNSLESVARMTIEDVMSLGITLVGHQKKIMSSIQTMRAQMLHLHGTGIQV

SEQ ID NO: 260 - protein, 1005 aa, Homo sapiens
  ref <308>: DATABASE ACCESSION NUMBER: GenBank No. NP065387
  ref <309>: DATABASE ENTRY DATE: 2004-11-16
MAPARGRLPPALWVVTAAAAAATCVSAARGEVNLLDTSTIHGDWGWLTYPAHGWDSINEVDESFQPIHTYQVCNVMSPNQNNWLRTSWVPRDGARRVYAEIKFTLRDCNSMPGVLGTCKETFNLYYLESDRDLGASTQESQFLKIDTIAADESFTGADLGVRRLKLNTEVRSVGPLSKRGFYLAFQDIGACLAILSLRIYYKKCPAMVRNLAAFSEAVTGADSSSLVEVRGQCVRHSEERDTPKMYCSAEGEWLVPIGKCVCSAGYEERRDACVACELGFYKSAPGDQLCARCPPHSHSAAPAAQACHCDLSYYRAALDPPSSACTRPPSAPVNLISSVNGTSVTLEWAPPLDPGGRSDITYNAVCRRCPWALSRCEACGSGTRFVPQQTSLVQASLLVANLLAHMNYSFWIEAVNGVSDLSPEPRRAAVVNITTNQAAPSQVVVIRQERAGQTSVSLLWQEPEQPNGIILEYEIKYYEKDKEMQSYSTLKAVTTRATVSGLKPGTRYVFQVRARTSAGCGRFSQAMEVETGKPRPRYDTRTIVWICLTLITGLVVLLLLLICKKRHCGYSKAFQDSDEEKMHYQNGQAPPPVFLPLHHPPGKLPEPQFYAEPHTYEEPGRAGRSFTREIEASRIHIEKIIGSGDSGEVCYGRLRVPGQRDVPVAIKALKAGYTERQRRDFLSEASIMGQFDHPNIIRLEGVVTRGRLAMIVTEYMENGSLDTFLRTHDGQFTIMQLVGMLRGVGAGMRYLSDLGYVHRDLAARNVLVDSNLVCKVSDFGLSRVLEDDPDAAYTTTGGKIPIRWTAPEAIAFRTFSSASDVWSFGVVMWEVLAYGERPYWNMTNRDVISSVEEGYRLPAPMGCPHALHQLMLDCWHKDRAQRPRFSQIVSVLDALIRSPESLRATATVSRCPPPAFVRSCFDLRGGSGGGGGLTVGDWLDSIRMGRYRDHFAAGGYSSLGMVLRMNAQDVRALGITLMGHQKKILGSIQTMRAQLTSTQGPRRHL

SEQ ID NO: 261 - protein, 984 aa, Homo sapiens
  ref <308>: DATABASE ACCESSION NUMBER: GenBank No. NP004432
  ref <309>: DATABASE ENTRY DATE: 2004-11-15
MALDYLLLLLLASAVAAMEETLMDTRTATAELGWTANPASGWEEVSGYDENLNTIRTYQVCNVFEPNQNNWLLTTFINRRGAHRIYTEMRFTVRDCSSLPNVPGSCKETFNLYYYETDSVIATKKSAFWSEAPYLKVDTIAADESFSQVDFGGRLMKVNTEVRSFGPLTRNGFYLAFQDYGACMSLLSVRVFFKKCPSIVQNFAVFPETMTGAESTSLVIARGTCIPNAEEVDVPIKLYCNGDGEWMVPIGRCTCKPGYEPENSVACKACPAGTFKASQEAEGCSHCPSNSRSPAEASPICTCRTGYYRADFDPPEVACTSVPSGPRNVISIVNETSIILEWHPPRETGGRDDVTYNIICKKCRADRRSCSRCDDNVEFVPRQLGLTECRVSISSLWAHTPYTFDIQAINGVSSKSPFPPQHVSVNITTNQAAPSTVPIMHQVSATMRSITLSWPQPEQPNGIILDYEIRYYEKEHNEFNSSMARSQTNTARIDGLRPGMVYVVQVRARTVAGYGKFSGKMCFQTLTDDDYKSELREQLPLIAGSAAAGVVFVVSLVAISIVCSRKRAYSKEAVYSDKLQHYSTGRGSPGMKIYIDPFTYEDPNEAVREFAKEIDVSFVKIEEVIGAGEFGEVYKGRLKLPGKREIYVAIKTLKAGYSEKQRRDFLSEASIMGQFDHPNIIRLEGVVTKSRPVMIITEFMENGALDSFLRQNDGQFTVIQLVGMLRGIAAGMKYLAEMNYVHRDLAARNILVNSNLVCKVSDFGLSRYLQDDTSDPTYTSSLGGKIPVRWTAPEAIAYRKFTSASDVWSYGIVMWEVMSFGERPYWDMSNQDVINAIEQDYRLPPPMDCPAALHQLMLDCWQKDRNSRPRFAEIVNTLDKMIRNPASLKTVATITAVPSQPLLDRSIPDFTAFTTVDDWLSAIKMVQYRDSFLTAGFTSLQLVTQMTSEDLLRIGITLAGHQKKILNSIHSMRVQISQSPTAMA

SEQ ID NO: 262 - protein, 1055 aa, Homo sapiens
  ref <308>: DATABASE ACCESSION NUMBER: GenBank No. AAB94602
  ref <309>: DATABASE ENTRY DATE: 2000-11-29
MALRRLGAALLLLPLLAAVEETLMDSTTATAELGWMVHPPSGWEEVSGYDENMNTIRTYQVCNVFESSQNNWLRTKFIRRRGAHRIHVEMKFSVRDCSSIPSVPGSCKETFNLYYYEADFDSATKTFPNWMENPWVKVDTIAADESFSQVDLGGRVMKINTEVRSFGPVSRSGFYLAFQDYGGCMSLIAVRVFYRKCPRIIQNGAIFQETLSGAESTSLVAARGSCIANAEEVDVPIKLYCNGDGEWLVPIGRCMCKAGFEAVENGTVCRGCPSGTFKANQGDEACTHCPINSRTTSEGATNCVCRNGYYRADLDPLDMPCTTIPSAPQAVISSVNETSLMLEWTPPRDSGGREDLVYNIICKSCGSGRGACTRCGDNVQYAPRQLGLTEPRIYISDLLAHTQYTFEIQAVNGVTDQSPFSPQFASVNITTNQAAPSAVSIMHQVSRTVDSITLSWSQPDQPNGVILDYELQYYEKELSEYNATAIKSPTNTVTVQGLKAGAIYVFQVRARTVAGYGRYSGKMYFQTMTEAEYQTSIQEKLPLIIGSSAAGLVFLIAVVVIAIVCNRRGFERADSEYTDKLQHYTSGHMTPGMKIYIDPFTYEDPNEAVREFAKEIDISCVKIEQVIGAGEFGEVCSGHLKLPGKREIFVAIKTLKSGYTEKQRRDFLSEASIMGQFDHPNVIHLEGVVTKSTPVMIITEFMENGSLDSFLRQNDGQFTVIQLVGMLRGIAAGMKYLADMNYVHRDLAARNILVNSNLVCKVSDFGLSRFLEDDTSDPTYTSALGGKIPIRWTAPEAIQYRKFTSASDVWSYGIVMWEVMSYGERPYWDMTNQDVINAIEQDYRLPPPMDCPSALHQLMLDCWQKDRNHRPKFGQIVNTLDKMIRNPNSLKAMAPLSSGINLPLLDRTIPDYTSFNTVDEWLEAIKMGQYKESFANAGFTSFDVVSQMMMEDILRVGVTLAGHQKKILNSIQVMRAQMNQIQSVEGQPLARRPRATGRTKRCQPRDVTKKTCNSNDGKKKGMGKKKTDPGRGREIQGIFFKEDSHKESNDCSCGG

SEQ ID NO: 263 - protein, 998 aa, Homo sapiens
  ref <308>: DATABASE ACCESSION NUMBER: GenBank No. NP004434
  ref <309>: DATABASE ENTRY DATE: 2004-11-16
MARARPPPPPSPPPGLLPLLPPLLLLPLLLLPAGCRALEETLMDTKWVTSELAWTSHPESGWEEVSGYDEAMNPIRTYQVCNVRESSQNNWLRTGFIWRRDVQRVYVELKFTVRDCNSIPNIPGSCKETFNLFYYEADSDVASASSPFWMENPYVKVDTIAPDESFSRLDAGRVNTKVRSFGPLSKAGFYLAFQDQGACMSLISVRAFYKKCASTTAGFALFPETLTGAEPTSLVIAPGTCIPNAVEVSVPLKLYCNGDGEWMVPVGACTCATGHEPAAKESQCRPCPPGSYKAKQGEGPCLPCPPNSRTTSPAASICTCHNNFYRADSDSADSACTTVPSPPRGVISNVNETSLILEWSEPRDLGGRDDLLYNVICKKCHGAGGASACSRCDDNVEFVPRQLGLTERRVHISHLLAHTRYTFEVQAVNGVSGKSPLPPRYAAVNITTNQAAPSEVPTLRLHSSSGSSLTLSWAPPERPNGVILDYEMKYFEKSEGIASTVTSQMNSVQLDGLRPDARYVVQVRARTVAGYGQYSRPAEFETTSERGSGAQQLQEQLPLIVGSATAGLVFVVAVVVIAIVCLRKQRHGSDSEYTEKLQQYIAPGMKVYIDPFTYEDPNEAVREFAKEIDVSCVKIEEVIGAGEFGEVCRGRLKQPGRREVFVAIKTLKVGYTERQRRDFLSEASIMGQFDHPNIIRLEGVVTKSRPVMILTEFMENCALDSFLRLNDGQFTVIQLVGMLRGIAAGMKYLSEMNYVHRDLAARNILVNSNLVCKVSDFGLSRFLEDDPSDPTYTSSLGGKIPIRWTAPEAIAYRKFTSASDVWSYGIVMWEVMSYGERPYWDMSNQDVINAVEQDYRLPPPMDCPTALHQLMLDCWVRDRNLRPKFSQIVNTLDKLIRNAASLKVIASAQSGMSQPLLDRTVPDYTTFTTVGDWLDAIKMGRYKESFVSAGFASFDLVAQMTAEDLLRIGVTLAGHQKKILSSIQDMRLQMNQTLPVQV

SEQ ID NO: 264 - protein, 987 aa, Homo sapiens
  ref <308>: DATABASE ACCESSION NUMBER: GenBank No.NP004435
  ref <309>: DATABASE ENTRY DATE: 2004-11-16
MELRVLLCWASLAAALEETLLNTKLETADLKWVTFPQVDGQWEELSGLDEEQHSVRTYEVCDVQRAPGQAHWLRTGWVPRRGAVHVYATLRFTMLECLSLPRAGRSCKETFTVFYYESDADTATALTPAWMENPYIKVDTVAAEHLTRKRPGAEATGKVNVKTLRLGPLSKAGFYLAFQDQGACMALLSLHLFYKKCAQLTVNLTRFPETVPRELVVPVAGSCVVDAVPAPGPSPSLYCREDGQWAEQPVTGCSCAPGFEAAEGNTKCRACAQGTFKPLSGEGSCQPCPANSHSNTIGSAVCQCRVGYFRARTDPRGAPCTTPPSAPRSVVSRLNGSSLHLEWSAPLESGGREDLTYALRCRECRPGGSCAPCGGDLTFDPGPRDLVEPWVVVRGLRPDFTYTFEVTALNGVSSLATGPVPFEPVNVTTDREVPPAVSDIRVTRSSPSSLSLAWAVPRAPSGAVLDYEVKYHEKGAEGPSSVRFLKTSENRAELRGLKRGASYLVQVRARSEAGYGPFGQEHHSQTQLDESEGWREQLALIAGTAVVGVVLVLVVIVVAVLCLRKQSNGREAEYSDKHGQYLIGHGTKVYIDPFTYEDPNEAVREFAKEIDVSYVKIEEVIGAGEFGEVCRGRLKAPGKKESCVAIKTLKGGYTERQRREFLSEASIMGQFEHPNIIRLEGVVTNSMPVMILTEFMENGALDSFLRLNDGQFTVIQLVGMLRGIASGMRYLAEMSYVHRDLAARNILVNSNLVCKVSDFGLSRFLEENSSDPTYTSSLGGKIPIRWTAPEAIAFRKFTSASDAWSYGIVMWEVMSFGERPYWDMSNQDVINAIEQDYRLPPPPDCPTSLHQLMLDCWQKDRNARPRFPQVVSALDKMIRNPASLKIVARENGGASHPLLDQRQPHYSAFGSVGEWLRAIKMGRYEESFAAAGFGSFELVSQISAEDLLRIGVTLAGHQKKILASVQHMKSQAKPGTPGGTGGPAPQY

SEQ ID NO: 265 - protein, 1006 aa, Homo sapiens
  ref <308>: DATABASE ACCESSION NUMBER: GenBank No.NP004436
  ref <309>: DATABASE ENTRY DATE: 2004-11-29
MVCSLWVLLLVSSVLALEEVLLDTTGETSEIGWLTYPPGGWDEVSVLDDQRRLTRTFEACHVAGAPPGTGQDNWLQTHFVERRGAQRAHIRLHFSVRACSSLGVSGGTCRETFTLYYRQAEEPDSPDSVSSWHLKRWTKVDTIAADESFPSSSSSSSSSSSAAWAVGPHGAGQRAGLQLNVKERSFGPLTQRGFYVAFQDTGACLALVAVRLFSYTCPAVLRSFASFPETQASGAGGASLVAAVGTCVAHAEPEEDGVGGQAGGSPPRLHCNGEGKWMVAVGGCRCQPGYQPARGDKACQACPRGLYKSSAGNAPCSPCPARSHAPNPAAPVCPCLEGFYRASSDPPEAPCTGPPSAPQELWFEVQGSALMLHWRLPRELGGRGDLLFNVVCKECEGRQEPASGGGGTCHRCRDEVHFDPRQRGLTESRVLVGGLRAHVPYILEVQAVNGVSELSPDPPQAAAINVSTSHEVPSAVPVVHQVSRASNSITVSWPQPDQTNGNILDYQLRYYDQAEDESHSFTLTSETNTATVTQLSPGHIYGFQVRARTAAGHGPYGGKVYFQTLPQGELSSQLPERLSLVIGSILGALAFLLLAAITVLAVVFQRKRRGTGYTEQLQQYSSPGLGVKYYIDPSTYEDPCQAIRELAREVDPAYIKIEEVIGTGSFGEVRQGRLQPRGRREQTVAIQALWAGGAESLQMTFLGRAAVLGQFQHPNILRLEGVVTKSRPLMVLTEFMELGPLDSFLRQREGQFSSLQLVAMQRGVAAAMQYLSSFAFVHRSLSAHSVLVNSHLVCKVARLGHSPQGPSCLLRWAAPEVIAHGKHTTSSDVWSFGILMWEVMSYGERPYWDMSEQEVLNAIEQEFRLPPPPGCPPGLHLLMLDTWQKDRARRPHFDQLVAAFDKMIRKPDTLQAGGDPGERPSQALLTPVALDFPCLDSPQAWLSAIGLECYQDNFSKFGLCTFSDVAQLSLEDLPALGITLAGHQKKLLHHIQLLQQHLRQQGSVEV

SEQ ID NO: 266 - protein, 1255 aa, Homo sapiens [sequence omitted]

SEQ ID NO: 267 - protein, 1342 aa, Homo sapiens
  ref <308>: DATABASE ACCESSION NUMBER: GenBank No. NP001973
  ref <309>: DATABASE ENTRY DATE: 2004-12-20
MRANDALQVLGLLFSLARGSEVGNSQAVCPGTLNGLSVTGDAENQYQTLYKLYERCEVVMGNLEIVLTGHNADLSFLQWIREVTGYVLVAMNEFSTLPLPNLRVVRGTQVYDGKFAIFVMLNYNTNSSHALRQLRLTQLTEILSGGVYIEKNDKLCHMDTIDWRDIVRDRDAEIVVKDNGRSCPPCHEVCKGRCWGPGSEDCQTLTKTICAPQCNGHCFGPNPNQCCHDECAGGCSGPQDTDCFACRHFNDSGACVPRCPQPLVYNKLTFQLEPNPHTKYQYGGVCVASCPHNFVVDQTSCVRACPPDKMEVDKNGLKMCEPCGGLCPKACEGTGSGSRFQTVDSSNIDGFVNCTKILGNLDFLITGLNGDPWHKIPALDPEKLNVFRTVREITGYLNIQSWPPHMHNFSVFSNLTTIGGRSLYNRGFSLLIMKNLNVTSLGFRSLKEISAGRIYISANRQLCYHHSLNWTKVLRGPTEERLDIKHNRPRRDCVAEGKVCDPLCSSGGCWGPGPGQCLSCRNYSRGGVCVTHCNFLNGEPREFAHEAECFSCHPECQPMEGTATCNGSGSDTCAQCAHFRDGPHCVSSCPHGVLGAKGPIYKYPDVQNECRPCHENCTQGCKGPELQDCLGQTLVLIGKTHLTMALTVIAGLVVIFMMLGGTFLYWRGRRIQNKRAMRRYLERGESIEPLDPSEKANKVLARIFKETELRKLKVLGSGVFGTVHKGVWIPEGESIKIPVCIKVIEDKSGRQSFQAVTDHMLAIGSLDHAHIVRLLGLCPGSSLQLVTQYLPLGSLLDHVRQHRGALGPQLLLNWGVQIAKGMYYLEEHGMVHRNLAARNVLLKSPSQVQVADFGVADLLPPDDKQLLYSEAKTPIKWMALESIHFGKYTHQSDVWSYGVTVWELMTFGAEPYAGLRLAEVPDLLEKGERLAQPQICTIDVYMVMVKCWMIDENIRPTFKELANEFTRMARDPPRYLVIKRESGPGIAPGPEPHGLTNKKLEEVELEPELDLDLDLEAEEDNLATTTLGSALSLPVGTLNRPRGSQSLLSPSSGYMPMNQGNLGESCQESAVSGSSERCPRPVSLHPMPRGCLASESSEGHVTGSEAELQEKVSMCRSRSRSRSPRPRGDSAYHSQRHSLLTPVTPLSPPGLEEEDVNGYVMPDTHLKGTPSSREGTLSSVGLSSVLGTEEEDEDEEYEYMNRRRRHSPPHPPRPSSLEELGYEYMDVGSDLSASLGSTQSCPLHPVPIMPTAGTTPDEDYEYMNRQRDGGGPGGDYAAMGACPASEQGYEEMRAFQGPGHQAPHVHYARLKTLRSLEATDSAFDNPDYWHSRLFPKANAQRT

SEQ ID NO: 268 - protein, 820 aa, Homo sapiens [sequence omitted]

SEQ ID NO: 269 - protein, 821 aa, Homo sapiens
  ref <308>: DATABASE ACCESSION NUMBER: GenBank No. NP000132
  ref <309>: DATABASE ENTRY DATE: 2004-12-20
MVSWGRFICLVVVTMATLSLARPSFSLVEDTTLEPEEPPTKYQISQPEVYVAAPGESLEVRCLLKDAAVISWTKDGVHLGPNNRTVLIGEYLQIKGATPRDSGLYACTASRTVDSETWYFMVNVTDAISSGDDEDDTDGAEDFVSENSNNKRAPYWTNTEKMEKRLHAVPAANTVKFRCPAGGNPMPTMRWLKNGKEFKQEHRIGGYKVRNQHWSLIMESVVPSDKGNYTCVVENEYGSINHTYHLDVVERSPHRPILQAGLPANASTVVGGDVEFVCKVYSDAQPHIQWIKHVEKNGSKYGPDGLPYLKVLKAAGVNTTDKEIEVLYIRNVTFEDAGEYTCLAGNSIGISFHSAWLTVLPAPGREKEITASPDYLEIAIYCIGVFLIACMVVTVILCRMKNTTKKPDFSSQPAVHKLTKRIPLRRQVTVSAESSSSMNSNTPLVRITTRLSSTADTPMLAGVSEYELPEDPKWEFPRDKLTLGKPLGEGCFGQVVMAEAVGIDKDKPKEAVTVAVKMLKDDATEKDLSDLVSEMEMMKMIGKHKNIINLLGACTQDGPLYVIVEYASKGNLREYLRARRPPGMEYSYDINRVPEEQMTFKDLVSCTYQLARGMEYLASQKCIHRDLAARNVLVTENNVMKIADFGLARDINNIDYYKKTTNGRLPVKWMAPEALFDRVYTHQSDVWSFGVLMWEIFTLGGSPYPGIPVEELFKLLKEGHRMDKPANCTNELYMMMRDCWHAVPSQRPTFKQLVEDLDRILTLTTNEEYLDLSQPLEQYSPSYPDTRSSCSSGDDSVFSPDPMPYEPCLPQYPHINGSVKT

SEQ ID NO: 270 - protein, 806 aa, Homo sapiens
  ref <308>: DATABASE ACCESSION NUMBER: GenBank No. NP000133
  ref <309>: DATABASE ENTRY DATE: 2004-12-20
MGAPACALALCVAVAIVAGASSESLGTEQRVVGRAAEVPGPEPGQQEQLVFGSGDAVELSCPPPGGGPMGPTVWVKDGTGLVPSERVLVGPQRLQVLNASHEDSGAYSCRQRLTQRVLCHFSVRVTDAPSSGDDEDGEDEAEDTGVDTGAPYWTRPERMDKKLLAVPAANTVRFRCPAAGNPTPSISWLKNGREFRGEHRIGGIKLRHQQWSLVMESVVPSDRGNYTCVVENKFGSIRQTYTLDVLERSPHRPILQAGLPANQTAVLGSDVEFHCKVYSDAQPHIQWLKHVEVNGSKVGPDGTPYVTVLKTAGANTTDKELEVLSLHNVTFEDAGEYTCLAGNSIGFSHHSAWLVVLPAEEELVEADEAGSVYAGILSYGVGFFLFILVVAAVTLCRLRSPPKKGLGSPTVHKISRFPLKRQVSLESNASMSSNTPLVRIARLSSGEGPTLANVSELELPADPKWELSRARLTLGKPLGEGCFGQVVMAEAIGIDKDRAAKPVTVAVKMLKDDATDKDLSDLVSEMEMMKMIGKHKNIINLLGACTQGGPLYVLVEYAAKGNLREFLRARRPPGLDYSFDTCKPPEEQLTFKDLVSCAYQVARGMEYLASQKCIHRDLAARNVLVTEDNVMKIADFGLARDVHNLDYYKKTTNGRLPVKWMAPEALFDRVYTHQSDVWSFGVLLWEIFTLGGSPYPGIPVEELFKLLKEGHRMDKPANCTHDLYMIMRECWHAAPSQRPTFKQLVEDLDRVLTVTSTDEYLDLSAPFEQYSPGGQDTPSSSSSGDDSVFAHDLLPPAPPSSGGSRT

SEQ ID NO: 271 - protein, 802 aa, Homo sapiens
  ref <308>: DATABASE ACCESSION NUMBER: GenBank No. NP002002
  ref <309>: DATABASE ENTRY DATE: 2004-10-28
MRLLLALLGVLLSVPGPPVLSLEASEEVELEPCLAPSLEQQEQELTVALGQPVRLCCGRAERGGHWYKEGSRLAPAGRVRGWRGRLEIASFLPEDAGRYLCLARGSMIVLQNLTLITGDSLTSSNDDEDPKSHRDPSNRHSYPQQAPYWTHPQRMEKKLHAVPAGNTVKFRCPAAGNPTPTIRWLKDGQAFHGENRIGGIRLRHQHWSLVMESVVPSDRGTYTCLVENAVGSIRYNYLLDVLERSPHRPILQAGLPANTTAVVGSDVELLCKVYSDAQPHIQWLKHIVINGSSFGADGFPYVQVLKTADINSSEVEVLYLRNVSAEDAGEYTCLAGNSIGLSYQSAWLTVLPEEDPTWTAAAPEARYTDIILYASGSLALAVLLLLAGLYRGQALHGRHPRPPATVQKLSRFPLARQFSLESGSSGKSSSSLVRGVRLSSSGPALLAGLVSLDLPLDPLWEFPRDRLVLGKPLGEGCFGQVVRAEAFGMDPARPDQASTVAVKMLKDNASDKDLADLVSEMEVMKLIGRHKNIINLLGVCTQEGPLYVIVECAAKGNLREFLRARRPPGPDLSPDGPRSSEGPLSFPVLVSCAYQVARGMQYLESRKCIHRDLAARNVLVTEDNVMKIADFGLARGVHHIDYYKKTSNGRLPVKWMAPEALFDRVYTHQSDVWSFGILLWEIFTLGGSPYPGIPVEELFSLLREGHRMDRPPHCPPELYGLMRECWHAAPSQRPTFKQLVEALDKVLLAVSEEYLDLRLTFGPYSPSGGDASSTCSSSDSVFSHDPLPLGSSSFPFGSGVQT

SEQ ID NO: 272 - protein, 993 aa, Homo sapiens
  ref <308>: DATABASE ACCESSION NUMBER: GenBank No. NP004110
  ref <309>: DATABASE ENTRY DATE: 2005-01-22
MPALARDAGTVPLLVVFSAMIFGTITNQDLPVIKCVLINHKNNDSSVGKSSSYPMVSESPEDLGCALRPQSSGTVYEAAAVEVDVSASITLQVLVDAPGNISCLWVFKHSSLNCQPHFDLQNRGVVSMVILKMTETQAGEYLLFIQSEATNYTILFTVSIRNTLLYTLRRPYFRKMENQDALVCISESVPEPIVEWVLCDSQGESCKEESPAVVKKEEKVLHELFGTDIRCCARNELGRECTRLFTIDLNQTPQTTLPQLFLKVGEPLWIRCKAVHVNHGFGLTWELENKALEEGNYFEMSTYSTNRTMIRILFAFVSSVARNDTGYYTCSSSKHPSQSALVTIVGKGFINATNSSEDYEIDQYEEFCFSVRFKAYPQIRCTWTFSRKSFPCEQKGLDNGYSISKFCNHKHQPGEYIFHAENDDAQFTKMFTLNIRRKPQVLAEASASQASCFSDGYPLPSWTWKKCSDKSPNCTEEITEGVWNRKANRKVFGQWVSSSTLNMSEAIKGFLVKCCAYNSLGTSCETILLNSPGPFPFIQDNISFYATIGVCLLFIVVLTLLICHKYKKQFRYESQLQMVQVTGSSDNEYFYVDFREYEYDLKWEFPRENLEFGKVLGSGAFGKVMNATAYGISKTGVSIQVAVKMLKEKADSSEREALMSELKMMTQLGSHENIVNLLGACTLSGPIYLIFEYCCYGDLLNYLRSKREKFHRTWTEIFKEHNFSFYPTFQSHPNSSMPGSREVQIHPDSDQISGLHGNSFHSEDEIEYENQKRLEEEEDLNVLTFEDLLCFAYQVAKGMEFLEFKSCVHRDLAARNVLVTHGKVVKICDFGLARDIMSDSNYVVRGNARLPVKWMAPESLFEGIYTIKSDVWSYGILLWEIFSLGVNPYPGIPVDANFYKLIQNGFKMDQPFYATEEIYIIMQSCWAFDSRKRPSFPNLTSFLGCQLADAEEAMYQNVDGRVSECPHTYQNRRPFSREMDLGLLSPQAQVEDS

SEQ ID NO: 273 - protein, 1363 aa, Homo sapiens
  ref <308>: DATABASE ACCESSION NUMBER: GenBank No. NP000213
  ref <309>: DATABASE ENTRY DATE: 2004-12-20
MQRGAALCLRLWLCLGLLDGLVSDYSMTPPTLNITEESHVIDTGDSLSISCRGQHPLEWAWPGAQEAPATGDKDSEDTGVVRDCEGTDARPYCKVLLLHEVHANDTGSYVCYYKYIKARIEGTTAASSYVFVRDFEQPFINKPDTLLVNRKDAMWVPCLVSIPGLNVTLRSQSSVLWPDGQEVVWDDRRGMLVSTPLLHDALYLQCETTWGDQDFLSNPFLVHITGNELYDIQLLPRKSLELLVGEKLVLNCTVWAEFNSGVTFDWDYPGKQAERGKWVPERRSQQTHTELSSILTIHNVSQHDLGSYVCKANNGIQRFRESTEVIVHENPFISVEWLKGPILEATAGDELVKLPVKLAAYPPPEFQWYKDGKALSGRHSPHALVLKEVTEASTGTYTLALWNSAAGLRRNISLELVVNVPPQIHEKEASSPSIYSRHSRQALTCTAYGVPLPLSIQWHWRPWTPCKMFAQRSLRRRQQQDLMPQCRDWRAVTTQDAVNPIESLDTWTEFVEGKNKTVSKLVIQNANVSAMYKCVVSNKVGQDERLIYFYVTTIPDGFTIESKPSEELLEGQPVLLSCQADSYKYEHLRWYRLNLSTLHDAHGNPLLLDCKNVHLFATPLAASLEEVAPGARHATLSLSIPRVAPEHEGHYVCEVQDRRSHDKHCHKKYLSVQALEAPRLTQNLTDLLVNVSDSLEMQCLVAGAHAPSIVWYKDERLLEEKSGVDLADSNQKLSIQRVREEDAGPYLCSVCRPKGCVNSSASVAVEGSEDKGSMEIVILVGTGVIAVFFWVLLLLIFCNMRRPAHADIKTGYLSIIMDPGEVPLEEQCEYLSYDASQWEFPRERLHLGRVLGYGAFGKVVEASAFGIHKGSSCDTVAVKMLKEGATASEQRALMSELKILIHIGNHLNVVNLLGACTKPQGPLMVIVEFCKYGNLSNFLRAKRDAFSPCAEKSPEQRGRFRAMVELARLDRRRPGSSDRVLFARFSKTEGGARRASPDQEAEDLWLSPLTMEDLVCYSFQVARGMEFLASRKCIHRDLAARNILLSESDVVKICDFGLARDIYKDPDYVRKGSARLPLKWMAPESIFDKVYTTQSDVWSFGVLLWEIFSLGASPYPGVQINEEFCQRVRDGTRMRAPELATPAIRHIMLNCWSGDPKARPAFSELVEILGDLLQGRGLQEEEEVCMAPRSSQSSEEGSFSQVSTMALHIAQADAEDSPPSLQRHSLAARYYNWVSFPGCLARGAETRGSSRMKTFEEFPMTPTTYKGSVDNQTDSGMVLASEEFEQIESRHRQESGFSCKGPGQNVAVTRAHPDSQGRRRRPERGARGGQVFYNSEYGELSEPSEEDHCSPSARVTFFTDNSY

SEQ ID NO: 274 - protein, 1390 aa, Homo sapiens
  ref <308>: DATABASE ACCESSION NUMBER: GenBank No. NP000236
  ref <309>: DATABASE ENTRY DATE: 2004-10-28
MKAPAVLAPGILVLLFTLVQRSNGECKEALAKSEMNVNMKYQLPNFTAETPIQNVILHEHHIFLGATNYIYVLNEEDLQKVAEYKTGPVLEHPDCFPCQDCSSKANLSGGVWKDNINMALVVDTYYDDQLISCGSVNRGTCQRHVFPHNHTADIQSEVHCIFSPQIEEPSQCPDCVVSALGAKVLSSVKDRFINFFVGNTINSSYFPDHPLHSISVRRLKETKDGFMFLTDQSYIDVLPEFRDSYPIKYVHAFESNNFIYFLTVQRETLDAQTFHTRIIRFCSINSGLHSYMEMPLECILTEKRKKRSTKKEVFNILQAAYVSKPGAQLARQIGASLNDDILFGVFAQSKPDSAEPMDRSAMCAFPIKYVNDFFNKIVNKNNVRCLQHFYGPNHEHCFNRTLLRNSSGCEARRDEYRTEFTTALQRVDLFMGQFSEVLLTSISTFIKGDLTIANLGTSEGRFMQVVVSRSGPSTPHVNFLLDSHPVSPEVIVEHTLNQNGYTLVITGKKITKIPLNGLGCRHFQSCSQCLSAPPFVQCGWCHDKCVRSEECLSGTWTQQICLPAIYKVFPNSAPLEGGTRLTICGWDFGFRRNNKFDLKKTRVLLGNESCTLTLSESTMNTLKCTVGPAMNKHFNMSIIISNGHGTTQYSTFSYVDPVITSISPKYGPMAGGTLLTLTGNYLNSGNSRHISIGGKTCTLKSVSNSILECYTPAQTISTEFAVKLKIDLANRETSIFSYREDPIVYEIHPTKSFISGGSTITGVGKNLNSVSVPRMVINVHEAGRNFTVACQHRSNSEIICCTTPSLQQLNLQLPLKTKAFFMLDGILSKYFDLIYVHNPVFKPFEKPVMISMGNENVLEIKGNDIDPEAVKGEVLKVGNKSCENIHLHSEAVLCTVPNDLLKLNSELNIEWKQAISSTVLGKVIVQPDQNFTGLIAGVVSISTALLLLLGFFLWLKKRKQIKDLGSELVRYDARVHTPHLDRLVSARSVSPTTEMVSNESVDYRATFPEDQFPNSSQNGSCRQVQYPLTDMSPILTSGDSDISSPLLQNTVHIDLSALNPELVQAVQHVVIGPSSLIVHFNEVIGRGHFGCVYHGTLLDNDGKKIHCAVKSLNRITDIGEVSQFLTEGIIMKDFSHPNVLSLLGICLRSEGSPLVVLPYMKHGDLRNFIRNETHNPTVKDLIGFGLQVAKGMKYLASKKFVHRDLAARNCMLDEKFTVKVADFGLARDMYDKEYYSVHNKTGAKLPVKWMALESLQTQKFTTKSDVWSFGVLLWELMTRGAPPYPDVNTFDITVYLLQGRRLLQPEYCPDPLYEVMLKCWHPKAEMRPSFSELVSRISAIFSTFIGEHYVHVNATYVNVKCVAPYPSLLSSEDNADDEVDTRPASFWETS

SEQ ID NO: 275 - protein, 1089 aa, Homo sapiens
  ref <308>: DATABASE ACCESSION NUMBER: GenBank No. NP006197
  ref <309>: DATABASE ENTRY DATE: 2004-10-26
MGTSHPAFLVLGCLLTGLSLILCQLSLPSILPNENEKVVQLNSSFSLRCFGESEVSWQYPMSEEESSDVEIRNEENNSGLFVTVLEVSSASAAHTGLYTCYYNHTQTEENELEGRHIYIYVPDPDVAFVPLGMTDYLVIVEDDDSAIIPCRTTDPETPVTLHNSEGVVPASYDSRQGFNGTFTVGPYICEATVKGKKFQTIPFNVYALKATSELDLEMEALKTVYKSGETIVVTCAVFNNEVVDLQWTYPGEVKGKGITMLEEIKVPSIKLVYTLTVPEATVKDSGDYECAARQATREVKEMKKVTISVHEKGFIEIKPTFSQLEAVNLHEVKHFVVEVRAYPPPRISWLKNNLTLIENLTEITTDVEKIQEIRYRSKLKLIRAKEEDSGHYTIVAQNEDAVKSYTFELLTQVPSSILDLVDDHHGSTGGQTVRCTAEGTPLPDIEWMICKDIKKCNNETSWTILANNVSNIITEIHSRDRSTVEGRVTFAKVEETIAVRCLAKNLLGAENRELKLVAPTLRSELTVAAAVLVLLVIVIISLIVLVVIWKQKPRYEIRWRVIESISPDGHEYIYVDPMQLPYDSRWEFPRDGLVLGRVLGSGAFGKVVEGTAYGLSRSQPVMKVAVKMLKPTARSSEKQALMSELKIMTHLGPHLNIVNLLGACTKSGPIYIITEYCFYGDLVNYLHKNRDSFLSHHPEKPKKELDIFGLNPADESTRSYVILSFENNGDYMDMKQADTTQYVPMLERKEVSKYSDIQRSLYDRPASYKKKSMLDSEVKNLLSDDNSEGLTLLDLLSFTYQVARGMEFLASKNCVHRDLAARNVLLAQGKIVKICDFGLARDIMHDSNYVSKGSTFLPVKWMAPESIFDNLYTTLSDVWSYGILLWEIFSLGGTPYPGMMVDSTFYNKIKSGYRMAKPDHATSEVYEIMVKCWNSEPEKRPSFYHLSEIVENLLPGQYKKSYEKIHLDFLKSDHPAVARMRVDSDNAYIGVTYKNEEDKLKDWEGGLDEQRLSADSGYIIPLPDIDPVPEEEDLGKRNRHSSQTSEESAIETGSSSSTFIKREDETIEDIDMMDDIGIDSSDLVEDSFL

SEQ ID NO: 276 - protein, 1106 aa, Homo sapiens
  ref <308>: DATABASE ACCESSION NUMBER: GenBank No. NP002600
  ref <309>: DATABASE ENTRY DATE: 2004-10-26
MRLPGAMPALALKGELLLLSLLLLLEPQISQGLVVTPPGPELVLNVSSTFVLTCSGSAPVVWERMSQEPPQEMAKAQDGTFSSVLTLTNLTGLDTGEYFCTHNDSRGLETDERKRLYIFVPDPTVGFLPNDAEELFIFLTEITEITIPCRVTDPQLVVTLHEKKGDVALPVPYDHQRGFSGIFEDRSYICKTTIGDREVDSDAYYVYRLQVSSINVSVNAVQTVVRQGENITLMCIVIGNEVVNFEWTYPRKESGRLVEPVTDFLLDMPYHIRSILHIPSAELEDSGTYTCNVTESVNDHQDEKAINITVVESGYVRLLGEVGTLQFAELHRSRTLQVVFEAYPPPTVLWFKDNRTLGDSSAGEIALSTRNVSETRYVSELTLVRVKVAEAGHYTMRAFHEDAEVQLSFQLQINVPVRVLELSESHPDSGEQTVRCRGRGMPQPNIIWSACRDLKRCPRELPPTLLGNSSEEESQLETNVTYWEEEQEFEVVSTLRLQHVDRPLSVRCTLRNAVGQDTQEVIVVPHSLPFKVVVISAILALVVLTIISLIILIMLWQKKPRYEIRWKVIESVSSDGHEYIYVDPMQLPYDSTWELPRDQLVLGRTLGSGAFGQVVEATAHGLSHSQATMKVAVKMLKSTARSSEKQALMSELKIMSHLGPHLNVVNLLGACTKGGPIYIITEYCRYGDLVDYLHRNKHTFLQHHSDKRRPPSAELYSNALPVGLPLPSHVSLTGESDGGYMDMSKDESVDYVPMLDMKGDVKYADIESSNYMAPYDNYVPSAPERTCRATLINESPVLSYMDLVGFSYQVANGMEFLASKNCVHRDLAARNVLICEGKLVKICDFGLARDIMRDSNYISKGSTFLPLKWMAPESIFNSLYTTLSDVWSFGILLWEIFTLGGTPYPELPMNEQFYNAIKRGYRMAQPAHASDEIYEIMQKCWEEKFEIRPPFSQLVLLLERLLGEGYKKKYQQVDEEFLRSDHPAILRSQARLPGFHGLRSPLDTSSVLYTAVQPNEGDNDYIIPLPDPKPEVADEGPLEGSPSLASSTLNEVNTSSTISCDSPLEPQDEPEPEPQLELQVEPEPELEQLPDSGCPAPRAEAEDSFL

SEQ ID NO: 277 - protein, 1400 aa, Homo sapiens
  ref <308>: DATABASE ACCESSION NUMBER: GenBank No. NP002438
  ref <309>: DATABASE ENTRY DATE: 2004-10-28
MELLPPLPQSFLLLLLLPAKPAAGEDWQCPRTPYAASRDFDVKYVVPSFSAGGLVQAMVTYEGDRNESAVFVAIRNRLHVLGPDLKSVQSLATGPAGDPGCQTCAACGPGPHGPPGDTDTKVLVLDPALPALVSCGSSLQGRCFLHDLEPQGTAVHLAAPACLFSAHHNRPDDCPDCVASPLGTRVTVVEQGQASYFYVASSLDAAVAGSFSPRSVSIRRLKADASGFAPGFVALSVLPKHLVSYSIEYVHSFHTGAFVYFLTVQPASVTDDPSALHTRLARLSATEPELGDYRELVLDCRFAPKRRRRGAPEGGQPYPVLQVAHSAPVGAQLATELSIAEGQEVLFGVFVTGKDGGPGVGPNSVVCAFPIDLLDTLIDEGVERCCESPVHPGLRRGLDFFQSPSFCPNPPGLEALSPNTSCRHFPLLVSSSFSRVDLFNGLLGPVQVTALYVTRLDNVTVAHMGTMDGRILQVELVRSLNYLLYVSNFSLGDSGQPVQRDVSRLGDHLLFASGDQVFQVPIRGPGCRHFLTCGRCLRAWHFMGCGWCGNMCGQQKECPGSWQQDHCPPKLTEFHPHSGPLRGSTRLTLCGSNFYLHPSGLVPEGTHQVTVGQSPCRPLPKDSSKLRPVPRKDFVEEFECELEPLGTQAVGPTNVSLTVTNMPPGKHFRVDGTSVLRGFSFMEPVLIAVQPLFGPRAGGTCLTLEGQSLSVGTSRAVLVNGTECLLARVSEGQLLCATPPGATVASVPLSLQVGGAQVPGSWTFQYREDPVVLSISPNCGYINSHITICGQHLTSAWHLVLSFHDGLRAVESRCERQLPEQQLCRLPEYVVRDPQGWVAGNLSARGDGAAGFTLPGFRFLPPPHPPSANLVPLKPEEHAIKFEYIGLGAVADCVGINVTVGGESCQHEFRGDMVVCPLPPSLQLGQDGAPLQVCVDGECHILGRVVRPGPDGVPQSTLLGILLPLLLLVAALATALVFSYWWRRKQLVLPPNLNDLASLDQTAGATPLPILYSGSDYRSGLALPAIDGLDSTTCVHGASFSDSEDESCVPLLRKESIQLRDLDSALLAEVKDVLIPHERVVTHSDRVIGKGHFGVVYHGEYIDQAQNRIQCAIKSLSRITEMQQVEAFLREGLLMRGLNHPNVLALIGIMLPPEGLPHVLLPYMCHGDLLQFIRSPQRNPTVKDLISFGLQVARGMEYLAEQKFVHRDLAARNCMLDESFTVKVADFGLARDILDREYYSVQQHRHARLPVKWMALESLQTYRFTTKSDVWSFGVLLWELLTRGAPPYRHIDPFDLTHFLAQGRRLPQPEYCPDSLYQVMQQCWEADPAVRPTFRVLVGEVEQIVSALLGDHYVQLPATYMNLGPSTSHEMNVRPEQPQFSPMPGNVRRPRPLSEPPRPT

SEQ ID NO: 278 - protein, 1124 aa, Homo sapiens
  ref <308>: DATABASE ACCESSION NUMBER: GenBank No. NP000450
  ref <309>: DATABASE ENTRY DATE: 2004-10-26
MDSLASLVLCGVSLLLSGTVEGAMDLILINSLPLVSDAETSLTCIASGWRPHEPITIGRDFEALMNQHQDPLEVTQDVTREWAKKVVWKREKASKINGAYFCEGRVRGEAIRIRTMKMRQQASFLPATLTMTVDKGDNVNISFKKVLIKEEDAVIYKNGSFIHSVPRHEVPDILEVHLPHAQPQDAGVYSARYIGGNLFTSAFTRLIVRRCEAQKWGPECNHLCTACMNNGVCHEDTGECICPPGFMGRTCEKACELHTFGRTCKERCSGQEGCKSYVFCLPDPYGCSCATGWKGLQCNEACHPGFYGPDCKLRCSCNNGEMCDRFQGCLCSPGWQGLQCEREGIPRMTPKIVDLPDHIEVNSGKFNPICKASGWPLPTNEEMTLVKPDGTVLHPKDFNHTDHFSVAIFTIHRILPPDSGVWVCSVNTVAGMVEKPFNISVKVLPKPLNAPNVIDTGHNFAVINISSEPYFGDGPIKSKKLLYKPVNHYEAWQHIQVTNEIVTLNYLEPRTEYELCVQLVRRGEGGEGHPGPVRRFTTASIGLPPPRGLNLLPKSQTTLNLTWQPIFPSSEDDFYVEVERRSVQKSDQQNIKVPGNLTSVLLNNLHPREQYVVRARVNTKAQGEWSEDLTAWTLSDILPPQPENIKISNITHSSAVISWTILDGYSISSITIRYKVQGKNEDQHVDVKIKNATIIQYQLKGLEPETAYQVDIFAENNIGSSNPAFSHELVTLPESQAPADLGGGKMLLIAILGSAGMTCLTVLLAFLIILQLKRANVQRRMAQAFQNVREEPAVQFNSGTLALNRKVKNNPDPTIYPVLDWNDIKFQDVIGEGNFGQVLKARIKKDGLRMDAAIKRMKEYASKDDHRDFAGELEVLCKLGHHPNIINLLGACEHRGYLYLAIEYAPHGNLLDFLRKSRVLETDPAFAIANSTASTLSSQQLLHFAADVARGMDYLSQKQFIHRDLAARNILVGENYVAKIADFGLSRGQEVYVKKTMGRLPVRWMAIESLNYSVYTTNSDVWSYGVLLWEIVSLGGTPYCGMTCAELYEKLPQGYRLEKPLNCDDEVYDLMRQCWREKPYERPSFAQILVSLNRMLEERKTYVNTTLYEKFTYAGIDCSAEEAA

SEQ ID NO: 279 - protein, 1138 aa, Homo sapiens
  ref <308>: DATABASE ACCESSION NUMBER: GenBank No. NP005415
  ref <309>: DATABASE ENTRY DATE: 2004-12-18
MVWRVPPFLLPILFLASHVGAAVDLTLLANLRLTDPQRFFLTCVSGEAGAGRGSDAWGPPLLLEKDDRIVRTPPGPPLRLARNGSHQVTLRGFSKPSDLVGVFSCVGGAGARRTRVIYVHNSPGAHLLPDKVTHTVNKGDTAVLSARVHKEKQTDVIWKSNGSYFYTLDWHEAQDGRFLLQLPNVQPPSSGIYSATYLEASPLGSAFFRLIVRGCGAGRWGPGCTKECPGCLHGGVCHDHDGECVCPPGFTGTRCEQACREGRFGQSCQEQCPGISGCRGLTFCLPDPYGCSCGSGWRGSQCQEACAPGHFGADCRLQCQCQNGGTCDRFSGCVCPSGWHGVHCEKSDRIPQILNMASELEFNLETMPRINCAAAGNPFPVRGSIELRKPDGTVLLSTKAIVEPEKTTAEFEVPRLVLADSGFWECRVSTSGGQDSRRFKVNVKVPPVPLAAPRLLTKQSRQLVVSPLVSFSGDGPISTVRLHYRPQDSTMDWSTIVVDPSENVTLMNLRPKTGYSVRVQLSRPGEGGEGAWGPPTLMTTDCPEPLLQPWLEGWHVEGTDRLRVSWSLPLVPGPLVGDGFLLRLWDGTRGQERRENVSSPQARTALLTGLTPGTHYQLDVQLYHCTLLGPASPPAHVLLPPSGPPAPRHLHAQALSDSEIQLTWKHPEALPGPISKYVVEVQVAGGAGDPLWIDVDRPEETSTIIRGLNASTRYLFRMRASIQGLGDWSNTVEESTLGNGLQAEGPVQESRAAEEGLDQQLILAVVGSVSATCLTILAALLTLVCIRRSCLHRRRTFTYQSGSGEETILQFSSGTLTLTRRPKLQPEPLSYPVLEWEDITFEDLIGEGNFGQVIRAMIKKDGLKMNAAIKMLKEYASENDHRDFAGELEVLCKLGHHPNIINLLGACKNRGYLYIAIEYAPYGNLLDFLRKSRVLETDPAFAREHGTASTLSSRQLLRFASDAANGMQYLSEKQFIHRDLAARNVLVGENLASKIADFGLSRGEEVYVKKTMGRLPVRWMAIESLNYSVYTTKSDVWSFGVLLWEIVSLGGTPYCGMTCAELYEKLPQGYRMEQPRNCDDEVYELMRQCWRDRPYERPPFAQIALQLGRMLEARKAYVNMSLFENFTYAGIDATAEEA

SEQ ID NO: 280 - protein, 455 aa, Homo sapiens
  ref <308>: DATABASE ACCESSION NUMBER: GenBank No. NP001056
  ref <309>: DATABASE ENTRY DATE: 2004-10-27
MGLSTVPDLLLPLVLLELLVGIYPSGVIGLVPHLGDREKRDSVCPQGKYIHPQNNSICCTKCHKGTYLYNDCPGPGQDTDCRECESGSFTASENHLRHCLSCSKCRKEMGQVEISSCTVDRDTVCGCRKNQYRHYWSENLFQCFNCSLCLNGTVHLSCQEKQNTVCTCHAGFFLRENECVSCSNCKKSLECTKLCLPQIENVKGTEDSGTTVLLPLVIFFGLCLLSLLFIGLMYRYQRWKSKLYSIVCGKSTPEKEGELEGTTTKPLAPNPSFSPTPGFTPTLGFSPVPSSTFTSSSTYTPGDCPNFAAPRREVAPPYQGADPILATALASDPIPNPLQKWEDSAHKPQSLDTDDPATLYAVVENVPPLRWKEFVRRLGLSDHEIDRLELQNGRCLREAQYSMLATWRRRTPRREATLELLGRVLRDMDLLGCLEDIEEALCGPAALPPAPSLLR

SEQ ID NO: 281 - protein, 461 aa, Homo sapiens
  ref <308>: DATABASE ACCESSION NUMBER: GenBank No. NP001057
  ref <309>: DATABASE ENTRY DATE: 2004-10-26
MAPVAVWAALAVGLELWAAAHALPAQVAFTPYAPEPGSTCRLREYYDQTAQMCCSKCSPGQHAKVFCTKTSDTVCDSCEDSTYTQLWNWVPECLSCGSRCSSDQVETQACTREQNRICTCRPGWYCALSKQEGCRLCAPLRKCRPGFGVARPGTETSDVVCKPCAPGTFSNTTSSTDICRPHQICNVVAIPGNASMDAVCTSTSPTRSMAPGAVHLPQPVSTRSQHTQPTPEPSTAPSTSFLLPMGPSPPAEGSTGDFALPVGLIVGVTALGLLIIGVVNCVIMTQVKKKPLCLQREAKVPHLPADKARGTQGPEQQHLLITAPSSSSSSLESSASALDRRAPTRNQPQAPGVEASGAGEARASTGSSDSSPGGHGTQVNVTCIVNVCSSSDHSSQCSSQASSTMGDTDSSPSESPKDEQVPFSKEECAFRSQLETPETLLGSTEEKPLPLGVPDAGMKPS

SEQ ID NO: 282 - protein, 1338 aa, Homo sapiens
  ref <308>: DATABASE ACCESSION NUMBER: GenBank No. NP002010
  ref <309>: DATABASE ENTRY DATE: 2004-10-28
MVSYWDTGVLLCALLSCLLLTGSSSGSKLKDPELSLKGTQHIMQAGQTLHLQCRGEAAHKWSLPEMVSKESERLSITKSACGRNGKQFCSTLTLNTAQANHTGFYSCKYLAVPTSKKKETESAIYIFISDTGRPFVEMYSEIPEIIHMTEGRELVIPCRVTSPNITVTLKKFPLDTLIPDGKRIIWDSRKGFIISNATYKEIGLLTCEATVNGHLYKTNYLTHRQTNTIIDVQISTPRPVKLLRGHTLVLNCTATTPLNTRVQMTWSYPDEKNKRASVRRRIDQSNSHANIFYSVLTIDKMQNKDKGLYTCRVRSGPSFKSVNTSVHIYDKAFITVKHRKQQVLETVAGKRSYRLSMKVKAFPSPEVVWLKDGLPATEKSARYLTRGYSLIIKDVTEEDAGNYTILLSIKQSNVFKNLTATLIVNVKPQIYEKAVSSFPDPALYPLGSRQILTCTAYGIPQPTIKWFWHPCNHNHSEARCDFCSNNEESFILDADSNMGNRIESITQRMAIIEGKNKMASTLVVADSRISGIYICIASNKVGTVGRNISFYITDVPNGFHVNLEKMPTEGEDLKLSCTVNKFLYRDVTWILLRTVNNRTMHYSISKQKMAITKEHSITLNLTIMNVSLQDSGTYACRARNVYTGEEILQKKEITIRDQEAPYLLRNLSDHTVAISSSTTLDCHANGVPEPQITWFKNNHKIQQEPGIILGPGSSTLFIERVTEEDEGVYHCKATNQKGSVESSAYLTVQGTSDKSNLELITLTCTCVAATLFWLLLTLLIRKMKRSSSEIKTDYLSIIMDPDEVPLDEQCERLPYDASKWEFARERLKLGKSLGRGAFGKVVQASAFGIKKSPTCRTVAVKMLKEGATASEYKALMTELKILTHIGHHLNVVNLLGACTKQGGPLMVIVEYCKYGNLSNYLKSKRDLFFLNKDAALHMEPKKEKMEPGLEQGKKPRLDSVTSSESFASSGFQEDKSLSDVEEEEDSDGFYKEPITMEDLISYSFQVARGMEFLSSRKCIHRDLAARNILLSENNVVKICDFGLARDIYKNPDYVRKGDTRLPLKWMAPESIFDKIYSTKSDVWSYGVLLWEIFSLGGSPYPGVQMDEDFCSRLREGMRMRAPEYSTPEIYQIMLDCWHRDPKERPRFAELVEKLGDLLQANVQQDGKDYIPINAILTGNSGFTYSTPAFSEDFFKESISAPKFNSGSSDDVRYVNAFKFMSLERIKTFEELLPNATSMFDDYQGDSSTLLASPMLKRFTWTDSKPKASLKIDLRVTSKSKESGLSDVSRPSFCHSSCGHVSEGKRRFTYDHAELERKIACCSPPPDYNSVVLYSTPPI

SEQ ID NO: 283 - protein, 1356 aa, Homo sapiens
  ref <308>: DATABASE ACCESSION NUMBER: GenBank No. NP002244
  ref <309>: DATABASE ENTRY DATE: 2004-10-26
MQSKVLLAVALWLCVETRAASVGLPSVSLDLPRLSIQKDILTIKANTTLQITCRGQRDLDWLWPNNQSGSEQRVEVTECSDGLFCKTLTIPKVIGNDTGAYKCFYRETDLASVIYVYVQDYRSPFIASVSDQHGVVYITENKNKTVVIPCLGSISNLNVSLCARYPEKRFVPDGNRISWDSKKGFTIPSYMISYAGMVFCEAKINDESYQSIMYIVVVVGYRIYDVVLSPSHGIELSVGEKLVLNCTARTELNVGIDFNWEYPSSKHQHKKLVNRDLKTQSGSEMKKFLSTLTIDGVTRSDQGLYTCAASSGLMTKKNSTFVRVHEKPFVAFGSGMESLVEATVGERVRIPAKYLGYPPPEIKWYKNGIPLESNHTIKAGHVLTIMEVSERDTGNYTVILTNPISKEKQSHVVSLVVYVPPQIGEKSLISPVDSYQYGTTQTLTCTVYAIPPPHHIHWYWQLEEECANEPSQAVSVTNPYPCEEWRSVEDFQGGNKIEVNKNQFALIEGKNKTVSTLVIQAANVSALYKCEAVNKVGRGERVISFHVTRGPEITLQPDMQPTEQESVSLWCTADRSTFENLTWYKLGPQPLPIHVGELPTPVCKNLDTLWKLNATMFSNSTNDILIMELKNASLQDQGDYVCLAQDRKTKKRHCVVRQLTVLERVAPTITGNLENQTTSIGESIEVSCTASGNPPPQIMWFKDNETLVEDSGIVLKDGNRNLTIRRVRKEDEGLYTCQACSVLGCAKVEAFFIIEGAQEKTNLEIIILVGTAVIAMFFWLLLVIILRTVKRANGGELKTGYLSIVMDPDELPLDEHCERLPYDASKWEFPRDRLKLGKPLGRGAFGQVIEADAFGIDKTATCRTVAVKMLKEGATHSEHRALMSELKILIHIGHHLNVVNLLGACTKPGGPLMVIVEFCKFGNLSTYLRSKRNEFVPYKTKGARFRQGKDYVGAIPVDLKRRLDSITSSQSSASSGFVEEKSLSDVEEEEAPEDLYKDFLTLEHLICYSFQVAKGMEFLASRKCIHRDLAARNILLSEKNVVKICDFGLARDIYKDPDYVRKGDARLPLKWMAPETIFDRVYTIQSDVWSFGVLLWEIFSLGASPYPGVKIDEEFCRRLKEGTRMRAPDYTTPEMYQTMLDCWHGEPSQRPTFSELVEHLGNLLQANAQQDGKDYIVLPISETLSMEEDSGLSLPTSPVSCMEEEEVCDPKFHYDNTAGISQYLQNSKRKSRPVSVKTFEDIPLEEPEVKVIPDDNQTDSGMVLASEELKTLEDRTKLSPSFGGMVPSKSRESVASEGSNQTSGYQSGYHSDDTDTTVYSSEEAELLKLIEIGVQTGSTAQILQPDSGTTLSSPPV

SEQ ID NO: 284 - protein, 1298 aa, Homo sapiens
  ref <308>: DATABASE ACCESSION NUMBER: GenBank No. NP002011
  ref <309>: DATABASE ENTRY DATE: 2004-12-18
MQRGAALCLRLWLCLGLLDGLVSDYSMTPPTLNITEESHVIDTGDSLSISCRGQHPLEWAWPGAQEAPATGDKDSEDTGVVRDCEGTDARPYCKVLLLHEVHANDTGSYVCYYKYIKARIEGTTAASSYVFVRDFEQPFINKPDTLLVNRKDAMWVPCLVSIPGLNVTLRSQSSVLWPDGQEVVWDDRRGMLVSTPLLHDALYLQCETTWGDQDFLSNPFLVHITGNELYDIQLLPRKSLELLVGEKLVLNCTVWAEFNSGVTFDWDYPGKQAERGKWVPERRSQQTHTELSSILTIHNVSQHDLGSYVCKANNGIQRFRESTEVIVHENPFISVEWLKGPILEATAGDELVKLPVKLAAYPPPEFQWYKDGKALSGRHSPHALVLKEVTEASTGTYTLALWNSAAGLRRNISLELVVNVPPQIHEKEASSPSIYSRHSRQALTCTAYGVPLPLSIQWHWRPWTPCKMFAQRSLRRRQQQDLMPQCRDWRAVTTQDAVNPIESLDTWTEFVEGKNKTVSKLVIQNANVSAMYKCVVSNKVGQDERLIYFYVTTIPDGFTIESKPSEELLEGQPVLLSCQADSYKYEHLRWYRLNLSTLHDAHGNPLLLDCKNVHLFATPLAASLEEVAPGARHATLSLSIPRVAPEHEGHYVCEVQDRRSHDKHCHKKYLSVQALEAPRLTQNLTDLLVNVSDSLEMQCLVAGAHAPSIVWYKDERLLEEKSGVDLADSNQKLSIQRVREEDAGPYLCSVCRPKGCVNSSASVAVEGSEDKGSMEIVILVGTGVIAVFFWVLLLLIFCNMRRPAHADIKTGYLSIIMDPGEVPLEEQCEYLSYDASQWEFPRERLHLGRVLGYGAFGKVVEASAFGIHKGSSCDTVAVKMLKEGATASEQRALMSELKILIHIGNHLNVVNLLGACTKPQGPLMVIVEFCKYGNLSNFLRAKRDAFSPCAEKSPEQRGRFRAMVELARLDRRRPGSSDRVLFARFSKTEGGARRASPDQEAEDLWLSPLTMEDLVCYSFQVARGMEFLASRKCIHRDLAARNILLSESDVVKICDFGLARDIYKDPDYVRKGSARLPLKWMAPESIFDKVYTTQSDVWSFGVLLWEIFSLGASPYPGVQINEEFCQRVRDGTRMRAPELATPAIRHIMLNCWSGDPKARPAFSDLVEILGDLLQGRGLQEEEEVCMAPRSSQSSEEGSFSQVSTMALHIAQADAEDSPPSLQRHSLAARYYNWVSFPGCLARGAETRGSSRMKTFEEFPMTPTTYKGSVDNQTDSGMVLASEEFEQIESRHRQESGFR

SEQ ID NO: 285 - protein, 972 aa, Homo sapiens
  VARIANT 279: Xaa = V or M
  VARIANT 362: Xaa = H or R
  VARIANT 969: Xaa = Y or C
MGPGVLLLLLVATAWHGQGIPVIEPSVPELVVKPGATVTLRCVGNGSVEWDGPPSPHWTLYSDGSSSILSTNNATFQNTGTYRCTEPGDPLGGSAAIHLYVKDPARPWNVLAQEVVVFEDQDALLPCLLTDPVLEAGVSLVRVRGRPLMRHTNYSFSPWHGFTIHRAKFIQSQDYQCSALMGGRKVMSISIRLKVQKVIPGPPALTLVPAELVRIRGEAAQIVCSASSVDVNFDVFLQHNNTKLAIPQQSDFHNNRYQKVLTLNLDQVDFQHAGNYSCXASNVQGKHSTSMFFRVVESAYLNLSSEQNLIQEVTVGEGLNLKVMVEAYPGLQGFNWTYLGPFSDHQPEPKLANATTKDTYRXTFTLSLPRLKPSEAGRYSFLARNPGGWRALTFELTLRYPPEVSVIWTFINGSGTLLCAASGYPQPNVTWLQCSGHTDRCDEAQVLQVWDDPYPEVLSQEPFHKVTVQSLLTVETLEHNQTYECRAHNSVGSGSWAFIPISAGAHTHPPDEFLFTPVVVACMSIMALLLLLLLLLLYKYKQKPKYQVRWKIIESYEGNSYTFIDPTQLPYNEKWEFPRNNLQFGKTLGAGAFGKVVEATAFGLGKEDAVLKVAVKMLKSTAHADEKEALMSELKIMSHLGQHENIVNLLGACTHGGPVLVITEYCCYGDLLNFLRRKAEAMLGPSLSPGQDPEGGVDYKNIHLEKKYVRRDSGFSSQGVDTYVEMRPVSTSSNDSFSEQDLDKEDGRPLELRDLLHFSSQVAQGMAFLASKNCIHRDVAARNVLLTNGHVAKIGDFGLARDIMNDSNYIVKGNARLPVKWMAPESIFDCVYTVQSDVWSYGILLWEIFSLGLNPYPGILVNSKFYKLVKDGYQMAQPAFAPKNIYSIMQACWALEPTHRPTFQQICSFLQEQAQEDRRERDYTNLPSSSRSGGSGSSSSELEEESSSEHLTCCEQGDIAQPLLQPNNXQFC

SEQ ID NO: 286 - protein, 913 aa, Homo sapiens
  VARIANT 53: Xaa = W or A
  VARIANT 55,  68: Xaa = D or A
  VARIANT 66, 175: Xaa = S or A
  VARIANT 105: Xaa = R or A
  VARIANT 106: Xaa = H or A
  VARIANT 110: Xaa = L or A
  VARIANT 112: Xaa = K or A
  VARIANT 173: Xaa = V or A
  VARIANT 174: Xaa = M or A
MGPEALSSLLLLLLVASGDADMKGHFDPAKCRYALGMQDRTIPDSDISASSSXSXSTAARHSRLEXSXGDGAWCPAGSVFPKEEEYLQVDLQRLHLVALVGTQGXXAGGXGXEFSRSYRLRYSRDGRRWMGWKDRWGQEVISGNEDPEGVVLKDLGPPMVARLVRFYPRADRXXXVCLRVELYGCLWRDGLLSYTAPVGQTMYLSEAVYLNDSTYDGHTVGGLQYGGLGQLADGVVGLDDFRKSQELRVWPGYDYVGWSNHSFSSGYVEMEFEFDRLRAFQAMQVHCNNMHTLGARLPGGVECRFRRGPAMAWEGEPMRHNLGGNLGDPRARAVSVPLGGRVARFLQCRFLFAGPWLLFSEISFISDVVNNSSPALGGTFPPAPWWPPGPPPTNFSSLELEPRGQQPVAKAEGSPTAILIGCLVAIILLLLLIIALMLWRLHWRRLLSKAERRVLEEELTVHLSVPGDTILINNRPGPREPPPYQEPRPRGNPPHSAPCVPNGSALLLSNPAYRLLLATYARPPRGPGPPTPAWAKPTNTQAYSGDYMEPEKPGAPLLPPPPQNSVPHYAEADIVTLQGVTGGNTYAVPALPPGAVGDGPPRVDFPRSRLRFKEKLGEGQFGEVHLCEVDSPQDLVSLDFPLNVRKGHPLLVAVKILRPDATKNARNDFLKEVKIMSRLKDPNIIRLLGVCVQDDPLCMITDYMENGDLNQFLSAHQLEDKAAEGAPGDGQAAQGPTISYPMLLHVAAQIASGMRYLATLNFVHRDLATRNCLVGENFTIKIADFGMSRNLYAGDYYRVQGRAVLPIRWMAWECILMGKFTTASDVWAFGVTLWEVLMLCRAQPFGSAHRRAGHRERGGVLPGPGPAVYLSRPPACPQGLYELMLRCWSRESEQRPPFSQLHRFLAEDALNTV

SEQ ID NO: 287 - protein, 855 aa, Homo sapiens
  VARIANT 550: Xaa = G or R
MILIPRMLLVLFLLLPILSSAKAQVNPAICRYPLGMSGGQIPDEDITASSQWSESTAAKYGRLDSEEGDGAWCPEIPVEPDDLKEFLQIDLHTLHFITLVGTQGRHAGGHGIEFAPMYKINYSRDGTRWISWRNRHGKQVLDGNSNPYDIFLKDLEPPIVARFVRFIPVTDHSMNVCMRVELYGCVWLDGLVSYNAPAGQQFVLPGGSIIYLNDSVYDGAVGYSMTEGLGQLTDGVSGLDDFTQTHEYHVWPGYDYVGWRNESATNGYIEIMFEFDRIRNFTTMKVHCNNMFAKGVKIFKEVQCYFRSEASEWEPNAISFPLVLDDVNPSARFVTVPLHHRMASAIKCQYHFADTWMMFSEITFQSDAAMYNNSEALPTSPMAPTTYDPMLKVDDSNTRILIGCLVAIIFILLAIIVIILWRQFWQKMLEKASRRMLDDEMTVSLSLPSDSSMFNNNRSSSPSEQGSNSTYDRIFPLRPDYQEPSRLIRKLPEFAPGEEESGCSGVVKPVQPSGPEGVPHYAEADIVNLQGVTGGNTYSVPAVTMDLLSXKDVAVEEFPRKLLTFKEKLGEGQFGEVHLCEVEGMEKFKDKDFALDVSANQPVLVAVKMLRADANKNARNDFLKEIKIMSRLKDPNIIHLLSVCITDDPLCMITEYMENGDLNQFLSRHEPPNSSSSDVRTVSYTNLKFMATQIASGMKYLSSLNFVHRDLATRNCLVGKNYTIKIADFGMSRNLYSGDYYRIQGRAVLPIRWMSWESILLGKFTTASDVWAFGVTLWETFTFCQEQPYSQLSDEQVIENTGEFFRDQGRQTYLPQPAICPDSVYKLMLSCWRRDTKNRPSFQEIHLLLLQQGDE

SEQ ID NO: 288 - protein, 1210 aa, Homo sapiens
  VARIANT 521: Xaa = R or K
MRPSGTAGAALLALLAALCPASRALEEKKVCQGTSNKLTQLGTFEDHFLSLQRMFNNCEVVLGNLEITYVQRNYDLSFLKTIQEVAGYVLIALNTVERIPLENLQIIRGNMYYENSYALAVLSNYDANKTGLKELPMRNLQEILHGAVRFSNNPALCNVESIQWRDIVSSDFLSNMSMDFQNHLGSCQKCDPSCPNGSCWGAGEENCQKLTKIICAQQCSGRCRGKSPSDCCHNQCAAGCTGPRESDCLVCRKFRDEATCKDTCPPLMLYNPTTYQMDVNPEGKYSFGATCVKKCPRNYVVTDHGSCVRACGADSYEMEEDGVRKCKKCEGPCRKVCNGIGIGEFKDSLSINATNIKHFKNCTSISGDLHILPVAFRGDSFTHTPPLDPQELDILKTVKEITGFLLIQAWPENRTDLHAFENLEIIRGRTKQHGQFSLAVVSLNITSLGLRSLKEISDGDVIISGNKNLCYANTINWKKLFGTSGQKTKIISNRGENSCKATGQVCHALCSPEGCWGPEPXDCVSCRNVSRGRECVDKCNLLEGEPREFVENSECIQCHPECLPQAMNITCTGRGPDNCIQCAHYIDGPHCVKTCPAGVMGENNTLVWKYADAGHVCHLCHPNCTYGCTGPGLEGCPTNGPKIPSIATGMVGALLLLLVVALGIGLFMRRRHIVRKRTLRRLLQERELVEPLTPSGEAPNQALLRILKETEFKKIKVLGSGAFGTVYKGLWIPEGEKVKIPVAIKELREATSPKANKEILDEAYVMASVDNPHVCRLLGICLTSTVQLITQLMPFGCLLDYVREHKDNIGSQYLLNWCVQIAKGMNYLEDRRLVHRDLAARNVLVKTPQHVKITDFGLAKLLGAEEKEYHAEGGKVPIKWMALESILHRIYTHQSDVWSYGVTVWELMTFGSKPYDGIPASEISSILEKGERLPQPPICTIDVYMIMVKCWMIDADSRPKFRELIIEFSKMARDPQRYLVIQGDERMHLPSPTDSNFYRALMDEEDMDDVVDADEYLIPQQGFFSSPSTSRTPLLSSLSATSNNSTVACIDRNGLQSCPIKEDSFLQRYSSDPTGALTEDSIDDTFLPVPEYINQSVPKRPAGSVQNPVYHNQPLNPAPSRDPHYQDPHSTAVGNPEYLNTVQPTCVNSTFDSPAHWAQKGSHQISLDNPDYQQDFFPKEAKPNGIFKGSTAENAEYLRVAPQSSEFIGA

SEQ ID NO: 289 - protein, 976 aa, Homo sapiens
  VARIANT 160: Xaa = A or V
MERRWPLGLGLVLLLCAPLPPGARAKEVTLMDTSKAQGELGWLLDPPKDGWSEQQQILNGTPLYMYQDCPMQGRRDTDHWLRSNWIYRGEEASRVHVELQFTVRDCKSFPGGAGPLGCKETFNLLYMESDQDVGIQLRRPLFQKVTTVAADQSFTIRDLXSGSVKLNVERCSLGRLTRRGLYLAFHNPGACVALVSVRVFYQRCPETLNGLAQFPDTLPGPAGLVEVAGTCLPHARASPRPSGAPRMHCSPDGEWLVPVGRCHCEPGYEEGGSGEACVACPSGSYRMDMDTPHCLTCPQQSTAESEGATICTCESGHYRAPGEGPQVACTGPPSAPRNLSFSASGTQLSLRWEPPADTGGRQDVRYSVRCSQCQGTAQDGGPCQPCGVGVHFSPGARGLTTPAVHVNGLEPYANYTFNVEAQNGVSGLGSSGHASTSVSISMGHAESLSGLSLRLVKKEPRQLELTWAGSRPRSPGANLTYELHVLNQDEERYQMVLEPRVLLTELQPDTTYIVRVRMLTPLGPGPFSPDHEFRTSPPVSRGLTGGEIVAVIFGLLLGAALLLGILVFRSRRAQRQRQQRQRDRATDVDREDKLWLKPYVDLQAYEDPAQGALDFTRELDPAWLMVDTVIGEGEFGEVYRGTLRLPSQDCKTVAIKTLKDTSPGGQWWNFLREATIMGQFSHPHILHLEGVVTKRKPIMIITEFMENGALDAFLREREDQLVPGQLVAMLQGIASGMNYLSNHNYVHRDLAARNILVNQNLCCKVSDFGLTRLLDDFDGTYETQGGKIPIRWTAPEAIAHRIFTTASDVWSFGIVMWEVLSFGDKPYGEMSNQEVMKSIEDGYRLPPPVDCPAPLYELMKNCWAYDRARRPHFQKLQAHLEQLLANPHSLRTIANFDPRMTLRLPSLSGSDGIPYRTVSEWLESIRMKRYILHFHSAGLDTMECVLELTAEDLTQMGITLPGHQKRILCSIQGFKD

SEQ ID NO: 290 - protein, 976 aa, Homo sapiens
  VARIANT 94: Xaa = I or N
  VARIANT 96: Xaa = I or F
  VARIANT 99: Xaa = K or N
  VARIANT 350: Xaa = P or T
  VARIANT 825: Xaa = E or K
MELQAARACFALLWGCALAAAAAAQGKEVVLLDFAAAGGELGWLTHPYGKGWDLMQNIMNDMPIYMYSVCNVMSGDQDNWLRTNWVYRGEAERXFXELXFTVRDCNSFPGGASSCKETFNLYYAESDLDYGTNFQKRLFTKIDTIAPDEITVSSDFEARHVKLNVEERSVGPLTRKGFYLAFQDIGACVALLSVRVYYKKCPELLQGLAHFPETIAGSDAPSLATVAGTCVDHAVVPPGGEEPRMHCAVDGEWLVPIGQCLCQAGYEKVEDACQACSPGFFKFEASESPCLECPEHTLPSPEGATSCECEEGFFRAPQDPASMPCTRPPSAPHYLTAVGMGAKVELRWTXPQDSGGREDIVYSVTCEQCWPESGECGPCEASVRYSEPPHGLTRTSVTVSDLEPHMNYTFTVEARNGVSGLVTSRSFRTASVSINQTEPPKVRLEGRSTTSLSVSWSIPPPQQSRVWKYEVTYRKKGDSNSYNVRRTEGFSVTLDDLAPDTTYLVQVQALTQEGQGAGSKVHEFQTLSPEGSGNLAVIGGVAVGVVLLLVLAGVGFFIHRRRKNQRARQSPEDVYFSKSEQLKPLKTYVDPHTYEDPNQAVLKFTTEIHPSCVTRQKVIGAGEFGEVYKGMLKTSSGKKEVPVAIKTLKAGYTEKQRVDFLGEAGIMGQFSHHNIIRLEGVISKYKPMMIITEYMENGALDKFLREKDGEFSVLQLVGMLRGIAAGMKYLANMNYVHRDLAARNILVNSNLVCKVSDFGLSRVLEDDPEATYTTSGGKIPIRWTAPEAISYRKFTSASDVWSFGIVMWEVMTYGERPYWELSNHXVMKAINDGFRLPTPMDCPSAIYQLMMQCWQQERARRPKFADIVSILDKLIRAPDSLKTLADFDPRVSIRLPSTSGSEGVPFRTVSEWLESIKMQQYTEHFMAAGYTAIEKVVQMTNDDIKRIGVRLPGHQKRIAYSLLGLKDQVNTVGIPI

SEQ ID NO: 291 - protein, 983 aa, Homo sapiens
  VARIANT 914: Xaa = R or H
MDCQLSILLLLSCSVLDSFGELIPQPSNEVNLLDSKTIQGELGWISYPSHGWEEISGVDEHYTPIRTYQVCNVMDHSQNNWLRTNWVPRNSAQKIYVELKFTLRDCNSIPLVLGTCKETFNLYYMESDDDHGVKFREHQFTKIDTIAADESFTQMDLGDRILKLNTEIREVGPVNKKGFYLAFQDVGACVALVSVRVYFKKCPFTVKNLAMFPDTVPMDSQSLVEVRGSCVNNSKEEDPPRMYCSTEGEWLVPIGKCSCNAGYEERGFMCQACRPGFYKALDGNMKCAKCPPHSSTQEDGSMNCRCENNYFRADKDPPSMACTRPPSSPRNVISNINETSVILDWSWPLDTGGRKDVTFNIICKKCGWNIKQCEPCSPNVRFLPRQFGLTNTTVTVTDLLAHTNYTFEIDAVNGVSELSSPPRQFAAVSITTNQAAPSPVLTIKKDRTSRNSISLSWQEPEHPNGIILDYEVKYYEKQEQETSYTILRARGTNVTISSLKPDTIYVFQIRARTAAGYGTNSRKFEFETSPDSFSISGESSQVVMIAISAAVAIILLTVVIYVLIGRFCGYKSKHGADEKRLHFGNGHLKLPGLRTYVDPHTYEDPTQAVHEFAKELDATNISIDKVVGAGEFGEVCSGRLKLPSKKEISVAIKTLKVGYTEKQRRDFLGEASIMGQFDHPNIIRLEGVVTKSKPVMIVTEYMENGSLDSFLRKHDAQFTVIQLVGMLRGIASGMKYLSDMGYVHRDLAARNILINSNLVCKVSDFGLSRVLEDDPEAAYTTRGGKIPIRWTSPEAIAYRKFTSASDVWSYGIVLWEVMSYGERPYWEMSNQDVIKAVDEGYRLPPPMDCPAALYQLMLDCWQKDRNNRPKFEQIVSILDKLIRNPGSLKIITSAAARPSNLLLDQSNVDITTFXTTGDWLNGVWTAHCKEIFTGVEYSSCDTIAKISTDDMKKVGVTVVGPQKKIISSIKALETQSKNGPVPV

SEQ ID NO: 292 - protein, 998 aa, Homo sapiens
  VARIANT 138: Xaa = I or V
  VARIANT 278: Xaa = P or S
MVFQTRYPSWIILCYIWLLRFAHTGEAQAAKEVLLLDSKAQQTELEWISSPPNGWEEISGLDENYTPIRTYQVCQVMEPNQNNWLRTNWISKGNAQRIFVELKFTLRDCNSLPGVLGTCKETFNLYYYETDYDTGRNXRENLYVKIDTIAADESFTQGDLGERKMKLNTEVREIGPLSKKGFYLAFQDVGACIALVSVKVYYKKCWSIIENLAIFPDTVTGSEFSSLVEVRGTCVSSAEEEAENAPRMHCSAEGEWLVPIGKCICKAGYQQKGDTCEXCGRGFYKSSSQDLQCSRCPTHSFSDKEGSSRCECEDGYYRAPSDPPYVACTRPPSAPQNLIFNINQTTVSLEWSPPADNGGRNDVTYRILCKRCSWEQGECVPCGSNIGYMPQQTGLEDNYVTVMDLLAHANYTFEVEAVNGVSDLSRSQRLFAAVSITTGQAAPSQVSGVMKERVLQRSVELSWQEPEHPNGVITEYEIKYYEKDQRERTYSTVKTKSTSASINNLKPGTVYVFQIRAFTAAGYGNYSPRLDVATLEEATGKMFEATAVSSEQNPVIIIAVVAVAGTIILVFMVFGFIIGRRHCGYSKADQEGDEELYFHFKFPGTKTYIDPETYEDPNRAVHQFAKELDASCIKIERVIGAGEFGEVCSGRLKLPGKRDVAVAIKTLKVGYTEKQRRDFLCEASIMGQFDHPNVVHLEGVVTRGKPVMIVIEFMENGALDAFLRKHDGQFTVIQLVGMLRGIAAGMRYLADMGYVHRDLAARNILVNSNLVCKVSDFGLSRVIEDDPEAVYTTTGGKIPVRWTAPEAIQYRKFTSASDVWSYGIVMWEVMSYGERPYWDMSNQDVIKAIEEGYRLPAPMDCPAGLHQLMLDCWQKERAERPKFEQIVGILDKMIRNPNSLKTPLGTCSRPISPLLDQNTPDFTTFCSVGEWLQAIKMERYKDNFTAAGYNSLESVARMTIEDVMSLGITLVGHQKKIMSSIQTMRAQMLHLHGTGIQV

SEQ ID NO: 293 - protein, 1005 aa, Homo sapiens
  VARIANT 301: Xaa = A or V
  VARIANT 444: Xaa = V or M
  VARIANT 612: Xaa = E or Q
MAPARGRLPPALWVVTAAAAAATCVSAARGEVNLLDTSTIHGDWGWLTYPAHGWDSINEVDESFQPIHTYQVCNVMSPNQNNWLRTSWVPRDGARRVYAEIKFTLRDCNSMPGVLGTCKETFNLYYLESDRDLGASTQESQFLKIDTIAADESFTGADLGVRRLKLNTEVRSVGPLSKRGFYLAFQDIGACLAILSLRIYYKKCPAMVRNLAAFSEAVTGADSSSLVEVRGQCVRHSEERDTPKMYCSAEGEWLVPIGKCVCSAGYEERRDACVACELGFYKSAPGDQLCARCPPHSHSAXPAAQACHCDLSYYRAALDPPSSACTRPPSAPVNLISSVNGTSVTLEWAPPLDPGGRSDITYNAVCRRCPWALSRCEACGSGTRFVPQQTSLVQASLLVANLLAHMNYSFWIEAVNGVSDLSPEPRRAAVVNITTNQAAPSQVXVIRQERAGQTSVSLLWQEPEQPNGIILEYEIKYYEKDKEMQSYSTLKAVTTRATVSGLKPGTRYVFQVRARTSAGCGRFSQAMEVETGKPRPRYDTRTIVWICLTLITGLVVLLLLLICKKRHCGYSKAFQDSDEEKMHYQNGQAPPPVFLPLHHPPGKLPEPQFYAXPHTYEEPGRAGRSFTREIEASRIHIEKIIGSGDSGEVCYGRLRVPGQRDVPVAIKALKAGYTERQRRDFLSEASIMGQFDHPNIIRLEGVVTRGRLAMIVTEYMENGSLDTFLRTHDGQFTIMQLVGMLRGVGAGMRYLSDLGYVHRDLAARNVLVDSNLVCKVSDFGLSRVLEDDPDAAYTTTGGKIPIRWTAPEAIAFRTFSSASDVWSFGVVMWEVLAYGERPYWNMTNRDVISSVEEGYRLPAPMGCPHALHQLMLDCWHKDRAQRPRFSQIVSVLDALIRSPESLRATATVSRCPPPAFVRSCFDLRGGSGGGGGLTVGDWLDSIRMGRYRDHFAAGGYSSLGMVLRMNAQDVRALGITLMGHQKKILGSIQTMRAQLTSTQGPRRHL

SEQ ID NO: 294 - protein, 984 aa, Homo sapiens
  VARIANT 87: Xaa = T or S
  VARIANT 152, 367: Xaa = G or R
  VARIANT 274: Xaa = T or R
  VARIANT 485: Xaa = R or S
  VARIANT 813: Xaa = V or I
  VARIANT 847: Xaa = M or T
  VARIANT 973: Xaa = R or W
MALDYLLLLLLASAVAAMEETLMDTRTATAELGWTANPASGWEEVSGYDENLNTIRTYQVCNVFEPNQNNWLLTTFINRRGAHRIYXEMRFTVRDCSSLPNVPGSCKETFNLYYYETDSVIATKKSAFWSEAPYLKVDTIAADESFSQVDFXGRLMKVNTEVRSFGPLTRNGFYLAFQDYGACMSLLSVRVFFKKCPSIVQNFAVFPETMTGAESTSLVIARGTCIPNAEEVDVPIKLYCNGDGEWMVPIGRCTCKPGYEPENSVACKACPAGXFKASQEAEGCSHCPSNSRSPAEASPICTCRTGYYRADFDPPEVACTSVPSGPRNVISIVNETSIILEWHPPRETGGRDDVTYNIICKKCRADXRSCSRCDDNVEFVPRQLGLTECRVSISSLWAHTPYTFDIQAINGVSSKSPFPPQHVSVNITTNQAAPSTVPIMHQVSATMRSITLSWPQPEQPNGIILDYEIRYYEKEHNEFNSSMAXSQTNTARIDGLRPGMVYVVQVRARTVAGYGKFSGKMCFQTLTDDDYKSELREQLPLIAGSAAAGVVFVVSLVAISIVCSRKRAYSKEAVYSDKLQHYSTGRGSPGMKIYIDPFTYEDPNEAVREFAKEIDVSFVKIEEVIGAGEFGEVYKGRLKLPGKREIYVAIKTLKAGYSEKQRRDFLSEASIMGQFDHPNIIRLEGVVTKSRPVMIITEFMENGALDSFLRQNDGQFTVIQLVGMLRGIAAGMKYLAEMNYVHRDLAARNILVNSNLVCKVSDFGLSRYLQDDTSDPTYTSSLGGKIPVRWTAPEAIAYRKFTSASDVWSYGIXMWEVMSFGERPYWDMSNQDVINAIEQDYRLPPPXDCPAALHQLMLDCWQKDRNSRPRFAEIVNTLDKMIRNPASLKTVATITAVPSQPLLDRSIPDFTAFTTVDDWLSAIKMVQYRDSFLTAGFTSLQLVTQMTSEDLLRIGITLAGHQKKILNSIHSMXVQISQSPTAMA

SEQ ID NO: 295 - protein, 1055 aa, Homo sapiens
  VARIANT 923: Xaa = E or K
MALRRLGAALLLLPLLAAVEETLMDSTTATAELGWMVHPPSGWEEVSGYDENMNTIRTYQVCNVFESSQNNWLRTKFIRRRGAHRIHVEMKFSVRDCSSIPSVPGSCKETFNLYYYEADFDSATKTFPNWMENPWVKVDTIAADESFSQVDLGGRVMKINTEVRSFGPVSRSGFYLAFQDYGGCMSLIAVRVFYRKCPRIIQNGAIFQETLSGAESTSLVAARGSCIANAEEVDVPIKLYCNGDGEWLVPIGRCMCKAGFEAVENGTVCRGCPSGTFKANQGDEACTHCPINSRTTSEGATNCVCRNGYYRADLDPLDMPCTTIPSAPQAVISSVNETSLMLEWTPPRDSGGREDLVYNIICKSCGSGRGACTRCGDNVQYAPRQLGLTEPRIYISDLLAHTQYTFEIQAVNGVTDQSPFSPQFASVNITTNQAAPSAVSIMHQVSRTVDSITLSWSQPDQPNGVILDYELQYYEKELSEYNATAIKSPTNTVTVQGLKAGAIYVFQVRARTVAGYGRYSGKMYFQTMTEAEYQTSIQEKLPLIIGSSAAGLVFLIAVVVIAIVCNRRGFERADSEYTDKLQHYTSGHMTPGMKIYIDPFTYEDPNEAVREFAKEIDISCVKIEQVIGAGEFGEVCSGHLKLPGKREIFVAIKTLKSGYTEKQRRDFLSEASIMGQFDHPNVIHLEGVVTKSTPVMIITEFMENGSLDSFLRQNDGQFTVIQLVGMLRGIAAGMKYLADMNYVHRDLAARNILVNSNLVCKVSDFGLSRFLEDDTSDPTYTSALGGKIPIRWTAPEAIQYRKFTSASDVWSYGIVMWEVMSYGERPYWDMTNQDVINAIEQDYRLPPPMDCPSALHQLMLDCWQKDRNHRPKFGQIVNTLDKMIRNPNSLKAMAPLSSGINLPLLDRTIPDYTSFNTVDEWLXAIKMGQYKESFANAGFTSFDVVSQMMMEDILRVGVTLAGHQKKILNSIQVMRAQMNQIQSVEGQPLARRPRATGRTKRCQPRDVTKKTCNSNDGKKKGMGKKKTDPGRGREIQGIFFKEDSHKESNDCSCGG

SEQ ID NO: 296 - protein, 998 aa, Homo sapiens
  VARIANT 981: Xaa = S or I
MARARPPPPPSPPPGLLPLLPPLLLLPLLLLPAGCRALEETLMDTKWVTSELAWTSHPESGWEEVSGYDEAMNPIRTYQVCNVRESSQNNWLRTGFIWRRDVQRVYVELKFTVRDCNSIPNIPGSCKETFNLFYYEADSDVASASSPFWMENPYVKVDTIAPDESFSRLDAGRVNTKVRSFGPLSKAGFYLAFQDQGACMSLISVRAFYKKCASTTAGFALFPETLTGAEPTSLVIAPGTCIPNAVEVSVPLKLYCNGDGEWMVPVGACTCATGHEPAAKESQCRPCPPGSYKAKQGEGPCLPCPPNSRTTSPAASICTCHNNFYRADSDSADSACTTVPSPPRGVISNVNETSLILEWSEPRDLGGRDDLLYNVICKKCHGAGGASACSRCDDNVEFVPRQLGLTERRVHISHLLAHTRYTFEVQAVNGVSGKSPLPPRYAAVNITTNQAAPSEVPTLRLHSSSGSSLTLSWAPPERPNGVILDYEMKYFEKSEGIASTVTSQMNSVQLDGLRPDARYVVQVRARTVAGYGQYSRPAEFETTSERGSGAQQLQEQLPLIVGSATAGLVFVVAVVVIAIVCLRKQRHGSDSEYTEKLQQYIAPGMKVYIDPFTYEDPNEAVREFAKEIDVSCVKIEEVIGAGEFGEVCRGRLKQPGRREVFVAIKTLKVGYTERQRRDFLSEASIMGQFDHPNIIRLEGVVTKSRPVMILTEFMENCALDSFLRLNDGQFTVIQLVGMLRGIAAGMKYLSEMNYVHRDLAARNILVNSNLVCKVSDFGLSRFLEDDPSDPTYTSSLGGKIPIRWTAPEAIAYRKFTSASDVWSYGIVMWEVMSYGERPYWDMSNQDVINAVEQDYRLPPPMDCPTALHQLMLDCWVRDRNLRPKFSQIVNTLDKLIRNAASLKVIASAQSGMSQPLLDRTVPDYTTFTTVGDWLDAIKMGRYKESFVSAGFASFDLVAQMTAEDLLRIGVTLAGHQKKILXSIQDMRLQMNQTLPVQV

SEQ ID NO: 297 - protein, 987 aa, Homo sapiens
  VARIANT 463: Xaa = A or D
  VARIANT 471: Xaa = Y or D
  VARIANT 926: Xaa = E or D
MELRVLLCWASLAAALEETLLNTKLETADLKWVTFPQVDGQWEELSGLDEEQHSVRTYEVCDVQRAPGQAHWLRTGWVPRRGAVHVYATLRFTMLECLSLPRAGRSCKETFTVFYYESDADTATALTPAWMENPYIKVDTVAAEHLTRKRPGAEATGKVNVKTLRLGPLSKAGFYLAFQDQGACMALLSLHLFYKKCAQLTVNLTRFPETVPRELVVPVAGSCVVDAVPAPGPSPSLYCREDGQWAEQPVTGCSCAPGFEAAEGNTKCRACAQGTFKPLSGEGSCQPCPANSHSNTIGSAVCQCRVGYFRARTDPRGAPCTTPPSAPRSVVSRLNGSSLHLEWSAPLESGGREDLTYALRCRECRPGGSCAPCGGDLTFDPGPRDLVEPWVVVRGLRPDFTYTFEVTALNGVSSLATGPVPFEPVNVTTDREVPPAVSDIRVTRSSPSSLSLAWAVPRAPSGXVLDYEVKXHEKGAEGPSSVRFLKTSENRAELRGLKRGASYLVQVRARSEAGYGPFGQEHHSQTQLDESEGWREQLALIAGTAVVGVVLVLVVIVVAVLCLRKQSNGREAEYSDKHGQYLIGHGTKVYIDPFTYEDPNEAVREFAKEIDVSYVKIEEVIGAGEFGEVCRGRLKAPGKKESCVAIKTLKGGYTERQRREFLSEASIMGQFEHPNIIRLEGVVTNSMPVMILTEFMENGALDSFLRLNDGQFTVIQLVGMLRGIASGMRYLAEMSYVHRDLAARNILVNSNLVCKVSDFGLSRFLEENSSDPTYTSSLGGKIPIRWTAPEAIAFRKFTSASDAWSYGIVMWEVMSFGERPYWDMSNQDVINAIEQDYRLPPPPDCPTSLHQLMLDCWQKDRNARPRFPQVVSALDKMIRNPASLKIVARENGGASHPLLDQRQPHYSAFGSVGEWLRAIKMGRYEXSFAAAGFGSFELVSQISAEDLLRIGVTLAGHQKKILASVQHMKSQAKPGTPGGTGGPAPQY

SEQ ID NO: 298 - protein, 1006 aa, Homo sapiens
  VARIANT 107: Xaa = G or S
  VARIANT 267: Xaa = P or R
  VARIANT 309: Xaa = S or A
  VARIANT 484: Xaa = R or Q
MVCSLWVLLLVSSVLALEEVLLDTTGETSEIGWLTYPPGGWDEVSVLDDQRRLTRTFEACHVAGAPPGTGQDNWLQTHFVERRGAQRAHIRLHFSVRACSSLGVSGXTCRETFTLYYRQAEEPDSPDSVSSWHLKRWTKVDTIAADESFPSSSSSSSSSSSAAWAVGPHGAGQRAGLQLNVKERSFGPLTQRGFYVAFQDTGACLALVAVRLFSYTCPAVLRSFASFPETQASGAGGASLVAAVGTCVAHAEPEEDGVGGQAGGSPXRLHCNGEGKWMVAVGGCRCQPGYQPARGDKACQACPRGLYKXSAGNAPCSPCPARSHAPNPAAPVCPCLEGFYRASSDPPEAPCTGPPSAPQELWFEVQGSALMLHWRLPRELGGRGDLLFNVVCKECEGRQEPASGGGGTCHRCRDEVHFDPRQRGLTESRVLVGGLRAHVPYILEVQAVNGVSELSPDPPQAAAINVSTSHEVPSAVPVVHQVSXASNSITVSWPQPDQTNGNILDYQLRYYDQAEDESHSFTLTSETNTATVTQLSPGHIYGFQVRARTAAGHGPYGGKVYFQTLPQGELSSQLPERLSLVIGSILGALAFLLLAAITVLAVVFQRKRRGTGYTEQLQQYSSPGLGVKYYIDPSTYEDPCQAIRELAREVDPAYIKIEEVIGTGSFGEVRQGRLQPRGRREQTVAIQALWAGGAESLQMTFLGRAAVLGQFQHPNILRLEGVVTKSRPLMVLTEFMELGPLDSFLRQREGQFSSLQLVAMQRGVAAAMQYLSSFAFVHRSLSAHSVLVNSHLVCKVARLGHSPQGPSCLLRWAAPEVIAHGKHTTSSDVWSFGILMWEVMSYGERPYWDMSEQEVLNAIEQEFRLPPPPGCPPGLHLLMLDTWQKDRARRPHFDQLVAAFDKMIRKPDTLQAGGDPGERPSQALLTPVALDFPCLDSPQAWLSAIGLECYQDNFSKFGLCTFSDVAQLSLEDLPALGITLAGHQKKLLHHIQLLQQHLRQQGSVEV

SEQ ID NO: 299 - protein, 1255 aa, Homo sapiens
  VARIANT 655: Xaa = I or V
MELAALCRWGLLLALLPPGAASTQVCTGTDMKLRLPASPETHLDMLRHLYQGCQVVQGNLELTYLPTNASLSFLQDIQEVQGYVLIAHNQVRQVPLQRLRIVRGTQLFEDNYALAVLDNGDPLNNTTPVTGASPGGLRELQLRSLTEILKGGVLIQRNPQLCYQDTILWKDIFHKNNQLALTLIDTNRSRACHPCSPMCKGSRCWGESSEDCQSLTRTVCAGGCARCKGPLPTDCCHEQCAAGCTGPKHSDCLACLHFNHSGICELHCPALVTYNTDTFESMPNPEGRYTFGASCVTACPYNYLSTDVGSCTLVCPLHNQEVTAEDGTQRCEKCSKPCARVCYGLGMEHLREVRAVTSANIQEFAGCKKIFGSLAFLPESFDGDPASNTAPLQPEQLQVFETLEEITGYLYISAWPDSLPDLSVFQNLQVIRGRILHNGAYSLTLQGLGISWLGLRSLRELGSGLALIHHNTHLCFVHTVPWDQLFRNPHQALLHTANRPEDECVGEGLACHQLCARGHCWGPGPTQCVNCSQFLRGQECVEECRVLQGLPREYVNARHCLPCHPECQPQNGSVTCFGPEADQCVACAHYKDPPFCVARCPSGVKPDLSYMPIWKFPDEEGACQPCPINCTHSCVDLDDKGCPAEQRASPLTSIXSAVVGILLVVVLGVVFGILIKRRQQKIRKYTMRRLLQETELVEPLTPSGAMPNQAQMRILKETELRKVKVLGSGAFGTVYKGIWIPDGENVKIPVAIKVLRENTSPKANKEILDEAYVMAGVGSPYVSRLLGICLTSTVQLVTQLMPYGCLLDHVRENRGRLGSQDLLNWCMQIAKGMSYLEDVRLVHRDLAARNVLVKSPNHVKITDFGLARLLDIDETEYHADGGKVPIKWMALESILRRRFTHQSDVWSYGVTVWELMTFGAKPYDGIPAREIPDLLEKGERLPQPPICTIDVYMIMVKCWMIDSECRPRFRELVSEFSRMARDPQRFVVIQNEDLGPASPLDSTFYRSLLEDDDMGDLVDAEEYLVPQQGFFCPDPAPGAGGMVHHRHRSSSTRSGGGDLTLGLEPSEEEAPRSPLAPSEGAGSDVFDGDLGMGAAKGLQSLPTHDPSPLQRYSEDPTVPLPSETDGYVAPLTCSPQPEYVNQPDVRPQPPSPREGPLPAARPAGATLERPKTLSPGKNGVVKDVFAFGGAVENPEYLTPQGGAAPQPHPPPAFSPAFDNLYYWDQDPPERGAPPSTFKGTPTAENPEYLGLDVPV

SEQ ID NO: 300 - protein, 820 aa, Homo sapiens
  VARIANT 22: Xaa = R or S
  VARIANT 97, 198: Xaa = G or D
  VARIANT 99, 275: Xaa = Y or C
  VARIANT 165: Xaa = A or S
  VARIANT 190: Xaa = K or E
  VARIANT 192: Xaa = S or G
  VARIANT 250: Xaa = P or R
  VARIANT 605: Xaa = V or M
  VARIANT 664: Xaa = W or R
  VARIANT 717: Xaa = M or R
  VARIANT 770: Xaa = P or S
  VARIANT 816: Xaa = G or R
  VARIANT 820: Xaa = R or C
MWSWKCLLFWAVLVTATLCTAXPSPTLPEQAQPWGAPVEVESFLVHPGDLLQLRCRLRDDVQSINWLRDGVQLAESNRTRITGEEVEVQDSVPADSXLXACVTSSPSGSDTTYFSVNVSDALPSSEDDDDDDDSSSEEKETDNTKPNPVAPYWTSPEKMEKKLHXVPAAKTVKFKCPSSGTPNPTLRWLXNXKEFKPXHRIGGYKVRYATWSIIMDSVVPSDKGNYTCIVENEYGSINHTYQLDVVERSXHRPILQAGLPANKTVALGSNVEFMXKVYSDPQPHIQWLKHIEVNGSKIGPDNLPYVQILKTAGVNTTDKEMEVLHLRNVSFEDAGEYTCLAGNSIGLSHHSAWLTVLEALEERPAVMTSPLYLEIIIYCTGAFLISCMVGSVIVYKMKSGTKKSDFHSQMAVHKLAKSIPLRRQVTVSADSSASMNSGVLLVRPSRLSSSGTPMLAGVSEYELPEDPRWELPRDRLVLGKPLGEGCFGQVVLAEAIGLDKDKPNRVTKVAVKMLKSDATEKDLSDLISEMEMMKMIGKHKNIINLLGACTQDGPLYVIVEYASKGNLREYLQARRPPGLEYCYNPSHNPEEQLSSKDLVSCAYQXARGMEYLASKKCIHRDLAARNVLVTEDNVMKIADFGLARDIHHIDYYKKTTNGRLPVKXMAPEALFDRIYTHQSDVWSFGVLLWEIFTLGGSPYPGVPVEELFKLLKEGHRXDKPSNCTNELYMMMRDCWHAVPSQRPTFKQLVEDLDRIVALTSNQEYLDLSMXLDQYSPSFPDTRSSTCSSGEDSVFSHEPLPEEPCLPRHPAQLANGXLKRX

SEQ ID NO: 301 - protein, 821 aa, Homo sapiens
  VARIANT 6: Xaa = R or P
  VARIANT 20: Xaa = W or C
  VARIANT 31: Xaa = T or I
  VARIANT 105: Xaa = Y or C
  VARIANT 152, 338, 384, 678: Xaa = R or G
  VARIANT 162, 186: Xaa = M or T
  VARIANT 172: Xaa = A or F
  VARIANT 252: Xaa = S or W or L
  VARIANT 253: Xaa = P or S or F
  VARIANT 267: Xaa = S or P
  VARIANT 276: Xaa = F or V
  VARIANT 278: Xaa = C or F
  VARIANT 281: Xaa = Y or C
  VARIANT 289: Xaa = Q or P
  VARIANT 315: Xaa = A or S
  VARIANT 340: Xaa = Y or H
  VARIANT 341: Xaa = T or P
  VARIANT 342: Xaa = C or R or Y or S or F or W
  VARIANT 344: Xaa = A or P or G
  VARIANT 347, 351, 372: Xaa = S or C
  VARIANT 443: Xaa = P or A
  VARIANT 549: Xaa = N or H
  VARIANT 565: Xaa = E or G
  VARIANT 641: Xaa = K or R
  VARIANT 659: Xaa = K or N
  VARIANT 663: Xaa = G or E
MVSWGXFICLVVVTMATLSLARPSFSLVEDXTLEPEEPPTKYQISQPEVYVAAPGESLEVRCLLKDAAVISWTKDGVHLGPNNRTVLIGEYLQIKGATPRDSGLXACTASRTVDSETWYFMVNVTDAISSGDDEDDTDGAEDFVSENSNNKXAPYWTNTEKXEKRLHAVPAXNTVKFRCPAGGNPXPTMRWLKNGKEFKQEHRIGGYKVRNQHWSLIMESVVPSDKGNYTCVVENEYGSINHTYHLDVVERXXHRPILQAGLPANAXTVVGGDVEXVXKVXSDAQPHIXXIKHVEKNGSKYGPDGLPYLKVLKAXGVNTTDKEIEVLYIRNVTFEDAXEXXXLXGNXIGIXFHSAWLTVLPAPGREKEITAXPDXLEIAIYCIXVFLIACMVVTVILCRMKNTTKKPDFSSQPAVHKLTKRIPLRRQVTVSAESSSSMNSNTXLVRITTRLSSTADTPMLAGVSEYELPEDPKWEFPRDKLTLGKPLGEGCFGQVVMAEAVGIDKDKPKEAVTVAVKMLKDDATEKDLSDLVSEMEMMKMIGKHKNIIXLLGACTQDGPLYVIVXYASKGNLREYLRARRPPGMEYSYDINRVPEEQMTFKDLVSCTYQLARGMEYLASQKCIHRDLAARNVLVTENNVMXIADFGLARDINNIDYYKXTTNXRLPVKWMAPEALFDXVYTHQSDVWSFGVLMWEIFTLGGSPYPGIPVEELFKLLKEGHRMDKPANCTNELYMMMRDCWHAVPSQRPTFKQLVEDLDRILTLTTNEEYLDLSQPLEQYSPSYPDTRSSCSSGDDSVFSPDPMPYEPCLPQYPHINGSVKT

SEQ ID NO: 302 - protein, 806 aa, Homo sapiens
  VARIANT 65: Xaa = G or R
  VARIANT 250: Xaa = P or R
  VARIANT 383: Xaa = F or C
MGAPACALALCVAVAIVAGASSESLGTEQRVVGRAAEVPGPEPGQQEQLVFGSGDAVELSCPPPXGGPMGPTVWVKDGTGLVPSERVLVGPQRLQVLNASHEDSGAYSCRQRLTQRVLCHFSVRVTDAPSSGDDEDGEDEAEDTGVDTGAPYWTRPERMDKKLLAVPAANTVRFRCPAAGNPTPSISWLKNGREFRGEHRIGGIKLRHQQWSLVMESVVPSDRGNYTCVVENKFGSIRQTYTLDVLERSXHRPILQAGLPANQTAVLGSDVEFHCKVYSDAQPHIQWLKHVEVNGSKVGPDGTPYVTVLKTAGANTTDKELEVLSLHNVTFEDAGEYTCLAGNSIGFSHHSAWLVVLPAEEELVEADEAGSVYAGILSYGVGXFLFILVVAAVTLCRLRSPPKKGLGSPTVHKISRFPLKRQVSLESNASMSSNTPLVRIARLSSGEGPTLANVSELELPADPKWELSRARLTLGKPLGEGCFGQVVMAEAIGIDKDRAAKPVTVAVKMLKDDATDKDLSDLVSEMEMMKMIGKHKNIINLLGACTQGGPLYVLVEYAAKGNLREFLRARRPPGLDYSFDTCKPPEEQLTFKDLVSCAYQVARGMEYLASQKCIHRDLAARNVLVTEDNVMKIADFGLARDVHNLDYYKKTTNGRLPVKWMAPEALFDRVYTHQSDVWSFGVLLWEIFTLGGSPYPGIPVEELFKLLKEGHRMDKPANCTHDLYMIMRECWHAAPSQRPTFKQLVEDLDRVLTVTSTDEYLDLSAPFEQYSPGGQDTPSSSSSGDDSVFAHDLLPPAPPSSGGSRT

SEQ ID NO: 303 - protein, 802 aa, Homo sapiens
  VARIANT 10: Xaa = V or I
  VARIANT 136: Xaa = P or L
  VARIANT 275: Xaa = S or R
  VARIANT 297: Xaa = D or V
  VARIANT 388: Xaa = G or R
  VARIANT 616: Xaa = R or L
MRLLLALLGXLLSVPGPPVLSLEASEEVELEPCLAPSLEQQEQELTVALGQPVRLCCGRAERGGHWYKEGSRLAPAGRVRGWRGRLEIASFLPEDAGRYLCLARGSMIVLQNLTLITGDSLTSSNDDEDPKSHRDXSNRHSYPQQAPYWTHPQRMEKKLHAVPAGNTVKFRCPAAGNPTPTIRWLKDGQAFHGENRIGGIRLRHQHWSLVMESVVPSDRGTYTCLVENAVGSIRYNYLLDVLERSPHRPILQAGLPANTTAVVGSDVELLCKVYXDAQPHIQWLKHIVINGSSFGAXGFPYVQVLKTADINSSEVEVLYLRNVSAEDAGEYTCLAGNSIGLSYQSAWLTVLPEEDPTWTAAAPEARYTDIILYASGSLALAVLLLLAXLYRGQALHGRHPRPPATVQKLSRFPLARQFSLESGSSGKSSSSLVRGVRLSSSGPALLAGLVSLDLPLDPLWEFPRDRLVLGKPLGEGCFGQVVRAEAFGMDPARPDQASTVAVKMLKDNASDKDLADLVSEMEVMKLIGRHKNIINLLGVCTQEGPLYVIVECAAKGNLREFLRARRPPGPDLSPDGPRSSEGPLSFPVLVSCAYQVARGMQYLESRKCIHRDLAAXNVLVTEDNVMKIADFGLARGVHHIDYYKKTSNGRLPVKWMAPEALFDRVYTHQSDVWSFGILLWEIFTLGGSPYPGIPVEELFSLLREGHRMDRPPHCPPELYGLMRECWHAAPSQRPTFKQLVEALDKVLLAVSEEYLDLRLTFGPYSPSGGDASSTCSSSDSVFSHDPLPLGSSSFPFGSGVQT

SEQ ID NO: 304 - protein, 993 aa, Homo sapiens
  VARIANT 835: Xaa = D or Y or H or F
  VARIANT 836: Xaa = I or S
  VARIANT 841: Xaa = N or I
  VARIANT 842: Xaa = Y or H
MPALARDAGTVPLLVVFSAMIFGTITNQDLPVIKCVLINHKNNDSSVGKSSSYPMVSESPEDLGCALRPQSSGTVYEAAAVEVDVSASITLQVLVDAPGNISCLWVFKHSSLNCQPHFDLQNRGVVSMVILKMTETQAGEYLLFIQSEATNYTILFTVSIRNTLLYTLRRPYFRKMENQDALVCISESVPEPIVEWVLCDSQGESCKEESPAVVKKEEKVLHELFGTDIRCCARNELGRECTRLFTIDLNQTPQTTLPQLFLKVGEPLWIRCKAVHVNHGFGLTWELENKALEEGNYFEMSTYSTNRTMIRILFAFVSSVARNDTGYYTCSSSKHPSQSALVTIVGKGFINATNSSEDYEIDQYEEFCFSVRFKAYPQIRCTWTFSRKSFPCEQKGLDNGYSISKFCNHKHQPGEYIFHAENDDAQFTKMFTLNIRRKPQVLAEASASQASCFSDGYPLPSWTWKKCSDKSPNCTEEITEGVWNRKANRKVFGQWVSSSTLNMSEAIKGFLVKCCAYNSLGTSCETILLNSPGPFPFIQDNISFYATIGVCLLFIVVLTLLICHKYKKQFRYESQLQMVQVTGSSDNEYFYVDFREYEYDLKWEFPRENLEFGKVLGSGAFGKVMNATAYGISKTGVSIQVAVKMLKEKADSSEREALMSELKMMTQLGSHENIVNLLGACTLSGPIYLIFEYCCYGDLLNYLRSKREKFHRTWTEIFKEHNFSFYPTFQSHPNSSMPGSREVQIHPDSDQISGLHGNSFHSEDEIEYENQKRLEEEEDLNVLTFEDLLCFAYQVAKGMEFLEFKSCVHRDLAARNVLVTHGKVVKICDFGLARXXMSDSXXVVRGNARLPVKWMAPESLFEGIYTIKSDVWSYGILLWEIFSLGVNPYPGIPVDANFYKLIQNGFKMDQPFYATEEIYIIMQSCWAFDSRKRPSFPNLTSFLGCQLADAEEAMYQNVDGRVSECPHTYQNRRPFSREMDLGLLSPQAQVEDS

SEQ ID NO: 305 - protein, 976 aa, Homo sapiens
  VARIANT 541: Xaa = M or L or V
  VARIANT 557: Xaa = W or R
  VARIANT 664: Xaa = G or R
  VARIANT 788, 136: Xaa = C or R
  VARIANT 802: Xaa = T or I
  VARIANT 816, 820: Xaa = D or V or H or Y
  VARIANT 822: Xaa = N or Y or K
  VARIANT 823: Xaa = Y or D or C
  VARIANT 835: Xaa = W or R
  VARIANT 869: Xaa = P or S
  VARIANT 900: Xaa = Y or F
  VARIANT 52: Xaa = D or N
  VARIANT 178: Xaa = A or T
MRGARGAWDFLCVLLLLLRVQTGSSQPSVSPGEPSPPSIHPGKSDLIVRVGXEIRLLCTDPGFVKWTFEILDETNENKQNEWITEKAEATNTGKYTCTNKHGLSNSIYVFVRDPAKLFLVDRSLYGKEDNDTLVRXPLTDPEVTNYSLKGCQGKPLPKDLRFIPDPKAGIMIKSVKRXYHRLCLHCSVDQEGKSVLSEKFILKVRPAFKAVPVVSVSKASYLLREGEEFTVTCTIKDVSSSVYSTWKRENSQTKLQEKYNSWHHGDFNYERQATLTISSARVNDSGVFMCYANNTFGSANVTTTLEVVDKGFINIFPMINTTVFVNDGENVDLIVEYEAFPKPEHQQWIYMNRTFTDKWEDYPKSENESNIRYVSELHLTRLKGTEGGTYTFLVSNSDVNAAIAFNVYVNTKPEILTYDRLVNGMLQCVAAGFPEPTIDWYFCPGTEQRCSASVLPVDVQTLNSSGPPFGKLVVQSSIDSSAFKHNGTVECKAYNDVGKTSAYFNFAFKGNNKEQIHPHTLFTPLLIGFVIVAGMMCIIVXILTYKYLQKPMYEVQXKVVEEINGNNYVYIDPTQLPYDHKWEFPRNRLSFGKTLGAGAFGKVVEATAYGLIKSDAAMTVAVKMLKPSAHLTEREALMSELKVLSYLGNHMNIVNLLGACTIGXPTLVITEYCCYGDLLNFLRRKRDSFICSKQEDHAEAALYKNLLHSKESSCSDSTNEYMDMKPGVSYVVPTKADKRRSVRIGSYIERDVTPAIMEDDELALDLEDLLSFSYQVAKGMAFLASKNXIHRDLAARNILLXHGRITKICDFGLARXIKNXSXXVVKGNARLPVKXMAPESIFNCVYTFESDVWSYGIFLWELFSLGSSXYPGMPVDSKFYKMIKEGFRMLSPEHAPAEMXDIMKTCWDADPLKRPTFKQIVQLIEKQISESTNHIYSNLANCSPNRQKPVVDHSVRINSVGSTASSSQPLLVHDDV

SEQ ID NO: 306 - protein, 1390 aa, Homo sapiens
  VARIANT 37, 145, 158, 237: Xaa = V or A
  VARIANT 39, 1250: Xaa = M or T
  VARIANT 42: Xaa = Q or R
  VARIANT 113, 508: Xaa = K or R
  VARIANT 114, 382: Xaa = D or N
  VARIANT 148, 476, 1094: Xaa = H or R
  VARIANT 151: Xaa = T or P
  VARIANT 168: Xaa = E or D
  VARIANT 193: Xaa = I or T
  VARIANT 216: Xaa = V or L
  VARIANT 276, 511, 729: Xaa = T or A
  VARIANT 314: Xaa = F or L
  VARIANT 337: Xaa = L or P
  VARIANT 340: Xaa = D or V
  VARIANT 400: Xaa = R or G
  VARIANT 481: Xaa = L or M
  VARIANT 500: Xaa = D or G
  VARIANT 501, 542: Xaa = Y or H
  VARIANT 622: Xaa = L or S
  VARIANT 720: Xaa = F or S
  VARIANT 1100: Xaa = N or Y
  VARIANT 1230: Xaa = C or Y
  VARIANT 1235: Xaa = Y or D
MKAPAVLAPGILVLLFTLVQRSNGECKEALAKSEMNXNXKYXLPNFTAETPIQNVILHEHHIFLGATNYIYVLNEEDLQKVAEYKTGPVLEHPDCFPCQDCSSKANLSGGVWXXNINMALVVDTYYDDQLISCGSVNRGTCQRHXFPXNHXADIQSEXHCIFSPQIEXPSQCPDCVVSALGAKVLSSVKDRFXNFFVGNTINSSYFPDHPLHSISXRRLKETKDGFMFLTDQSYIDXLPEFRDSYPIKYVHAFESNNFIYFLTVQRETLDAQTFHXRIIRFCSINSGLHSYMEMPLECILTEKRKKRSTKKEVXNILQAAYVSKPGAQLARQIGASXNDXILFGVFAQSKPDSAEPMDRSAMCAFPIKYVNDFFNKIVNKNXVRCLQHFYGPNHEHCFNXTLLRNSSGCEARRDEYRTEFTTALQRVDLFMGQFSEVLLTSISTFIKGDLTIANLGTSEGRFMQVVVSRSGPSTPXVNFLXDSHPVSPEVIVEHTLNQNXXTLVITGXKIXKIPLNGLGCRHFQSCSQCLSAPPFVQCGWCXDKCVRSEECLSGTWTQQICLPAIYKVFPNSAPLEGGTRLTICGWDFGFRRNNKFDLKKTRVLLGNESCTLTLSESTMNTXKCTVGPAMNKHFNMSIIISNGHGTTQYSTFSYVDPVITSISPKYGPMAGGTLLTLTGNYLNSGNSRHISIGGKTCTLKSVSNSILECYTPAQTISTEXAVKLKIDLXNRETSIFSYREDPIVYEIHPTKSFISGGSTITGVGKNLNSVSVPRMVINVHEAGRNFTVACQHRSNSEIICCXTPSLQQLNLQLPLKTKAFFMLDGILSKYFDLIYVHNPVFKPFEKPVMISMGNENVLEIKGNDIDPEAVKGEVLKVGNKSCENIHLHSEAVLCTVPNDLLKLNSELNIEWKQAISSTVLGKVIVQPDQNFTGLIAGVVSISTALLLLLGFFLWLKKRKQIKDLGSELVRYDARVHTPHLDRLVSARSVSPTTEMVSNESVDYRATFPEDQFPNSSQNGSCRQVQYPLTDMSPILTSGDSDISSPLLQNTVHIDLSALNPELVQAVQHVVIGPSSLIVHFNEVIGRGHFGCVYXGTLLDXDGKKIHCAVKSLNRITDIGEVSQFLTEGIIMKDFSHPNVLSLLGICLRSEGSPLVVLPYMKHGDLRNFIRNETHNPTVKDLIGFGLQVAKGMKYLASKKFVHRDLAARNCMLDEKFTVKVADFGLARDMXDKEYXSVHNKTGAKLPVKWXALESLQTQKFTTKSDVWSFGVLLWELMTRGAPPYPDVNTFDITVYLLQGRRLLQPEYCPDPLYEVMLKCWHPKAEMRPSFSELVSRISAIFSTFIGEHYVHVNATYVNVKCVAPYPSLLSSEDNADDEVDTRPASFWETS

SEQ ID NO: 307 - protein, 1106 aa, Homo sapiens
  VARIANT 29: Xaa = I or F
  VARIANT 194: Xaa = I or T
  VARIANT 345: Xaa = P or S
MRLPGAMPALALKGELLLLSLLLLLEPQXSQGLVVTPPGPELVLNVSSTFVLTCSGSAPVVWERMSQEPPQEMAKAQDGTFSSVLTLTNLTGLDTGEYFCTHNDSRGLETDERKRLYIFVPDPTVGFLPNDAEELFIFLTEITEITIPCRVTDPQLVVTLHEKKGDVALPVPYDHQRGFSGIFEDRSYICKTTXGDREVDSDAYYVYRLQVSSINVSVNAVQTVVRQGENITLMCIVIGNEVVNFEWTYPRKESGRLVEPVTDFLLDMPYHIRSILHIPSAELEDSGTYTCNVTESVNDHQDEKAINITVVESGYVRLLGEVGTLQFAELHRSRTLQVVFEAYPXPTVLWFKDNRTLGDSSAGEIALSTRNVSETRYVSELTLVRVKVAEAGHYTMRAFHEDAEVQLSFQLQINVPVRVLELSESHPDSGEQTVRCRGRGMPQPNIIWSACRDLKRCPRELPPTLLGNSSEEESQLETNVTYWEEEQEFEVVSTLRLQHVDRPLSVRCTLRNAVGQDTQEVIVVPHSLPFKVVVISAILALVVLTIISLIILIMLWQKKPRYEIRWKVIESVSSDGHEYIYVDPMQLPYDSTWELPRDQLVLGRTLGSGAFGQVVEATAHGLSHSQATMKVAVKMLKSTARSSEKQALMSELKIMSHLGPHLNVVNLLGACTKGGPIYIITEYCRYGDLVDYLHRNKHTFLQHHSDKRRPPSAELYSNALPVGLPLPSHVSLTGESDGGYMDMSKDESVDYVPMLDMKGDVKYADIESSNYMAPYDNYVPSAPERTCRATLINESPVLSYMDLVGFSYQVANGMEFLASKNCVHRDLAARNVLICEGKLVKICDFGLARDIMRDSNYISKGSTFLPLKWMAPESIFNSLYTTLSDVWSFGILLWEIFTLGGTPYPELPMNEQFYNAIKRGYRMAQPAHASDEIYEIMQKCWEEKFEIRPPFSQLVLLLERLLGEGYKKKYQQVDEEFLRSDHPAILRSQARLPGFHGLRSPLDTSSVLYTAVQPNEGDNDYIIPLPDPKPEVADEGPLEGSPSLASSTLNEVNTSSTISCDSPLEPQDEPEPEPQLELQVEPEPELEQLPDSGCPAPRAEAEDSFL

SEQ ID NO: 308 - protein, 1400 aa, Homo sapiens
  VARIANT 113, 1195: Xaa = G or S
  VARIANT 209: Xaa = G or A
  VARIANT 322, 523: Xaa = Q or R
  VARIANT 440: Xaa = N or S
  VARIANT 946: Xaa = V or M
  VARIANT 1232: Xaa = R or G or D or V
  VARIANT 1254: Xaa = M or T
  VARIANT 1335: Xaa = R or G
MELLPPLPQSFLLLLLLPAKPAAGEDWQCPRTPYAASRDFDVKYVVPSFSAGGLVQAMVTYEGDRNESAVFVAIRNRLHVLGPDLKSVQSLATGPAGDPGCQTCAACGPGPHXPPGDTDTKVLVLDPALPALVSCGSSLQGRCFLHDLEPQGTAVHLAAPACLFSAHHNRPDDCPDCVASPLGTRVTVVEQGQASYFYVASSLDAAVAXSFSPRSVSIRRLKADASGFAPGFVALSVLPKHLVSYSIEYVHSFHTGAFVYFLTVQPASVTDDPSALHTRLARLSATEPELGDYRELVLDCRFAPKRRRRGAPEGGQPYPVLXVAHSAPVGAQLATELSIAEGQEVLFGVFVTGKDGGPGVGPNSVVCAFPIDLLDTLIDEGVERCCESPVHPGLRRGLDFFQSPSFCPNPPGLEALSPNTSCRHFPLLVSSSFSRVDLFXGLLGPVQVTALYVTRLDNVTVAHMGTMDGRILQVELVRSLNYLLYVSNFSLGDSGQPVQRDVSRLGDHLLFASGDQVFQVPIXGPGCRHFLTCGRCLRAWHFMGCGWCGNMCGQQKECPGSWQQDHCPPKLTEFHPHSGPLRGSTRLTLCGSNFYLHPSGLVPEGTHQVTVGQSPCRPLPKDSSKLRPVPRKDFVEEFECELEPLGTQAVGPTNVSLTVTNMPPGKHFRVDGTSVLRGFSFMEPVLIAVQPLFGPRAGGTCLTLEGQSLSVGTSRAVLVNGTECLLARVSEGQLLCATPPGATVASVPLSLQVGGAQVPGSWTFQYREDPVVLSISPNCGYINSHITICGQHLTSAWHLVLSFHDGLRAVESRCERQLPEQQLCRLPEYVVRDPQGWVAGNLSARGDGAAGFTLPGFRFLPPPHPPSANLVPLKPEEHAIKFEYIGLGAVADCVGINVTVGGESCQHEFRGDMVVCPLPPSLQLGQDGAPLQVCVDGECHILGRVXRPGPDGVPQSTLLGILLPLLLLVAALATALVFSYWWRRKQLVLPPNLNDLASLDQTAGATPLPILYSGSDYRSGLALPAIDGLDSTTCVHGASFSDSEDESCVPLLRKESIQLRDLDSALLAEVKDVLIPHERVVTHSDRVIGKGHFGVVYHGEYIDQAQNRIQCAIKSLSRITEMQQVEAFLREGLLMRGLNHPNVLALIGIMLPPEGLPHVLLPYMCHGDLLQFIRSPQRNPTVKDLISFGLQVARXMEYLAEQKFVHRDLAARNCMLDESFTVKVADFGLARXILDREYYSVQQHRHARLPVKWXALESLQTYRFTTKSDVWSFGVLLWELLTRGAPPYRHIDPFDLTHFLAQGRRLPQPEYCPDSLYQVMQQCWEADPAVRPTFXVLVGEVEQIVSALLGDHYVQLPATYMNLGPSTSHEMNVRPEQPQFSPMPGNVRRPRPLSEPPRPT

SEQ ID NO: 309 - protein, 1124 aa, Homo sapiens
  VARIANT 346: Xaa = P or Q
  VARIANT 486: Xaa = V or I
  VARIANT 695: Xaa = I or T
  VARIANT 724: Xaa = A or T
  VARIANT 849: Xaa = R or W
MDSLASLVLCGVSLLLSGTVEGAMDLILINSLPLVSDAETSLTCIASGWRPHEPITIGRDFEALMNQHQDPLEVTQDVTREWAKKVVWKREKASKINGAYFCEGRVRGEAIRIRTMKMRQQASFLPATLTMTVDKGDNVNISFKKVLIKEEDAVIYKNGSFIHSVPRHEVPDILEVHLPHAQPQDAGVYSARYIGGNLFTSAFTRLIVRRCEAQKWGPECNHLCTACMNNGVCHEDTGECICPPGFMGRTCEKACELHTFGRTCKERCSGQEGCKSYVFCLPDPYGCSCATGWKGLQCNEACHPGFYGPDCKLRCSCNNGEMCDRFQGCLCSPGWQGLQCEREGIXRMTPKIVDLPDHIEVNSGKFNPICKASGWPLPTNEEMTLVKPDGTVLHPKDFNHTDHFSVAIFTIHRILPPDSGVWVCSVNTVAGMVEKPFNISVKVLPKPLNAPNVIDTGHNFAVINISSEPYFGDGPIKSKKLLYKPXNHYEAWQHIQVTNEIVTLNYLEPRTEYELCVQLVRRGEGGEGHPGPVRRFTTASIGLPPPRGLNLLPKSQTTLNLTWQPIFPSSEDDFYVEVERRSVQKSDQQNIKVPGNLTSVLLNNLHPREQYVVRARVNTKAQGEWSEDLTAWTLSDILPPQPENIKISNITHSSAVISWTILDGYSISSITIRYKVQGKNEDQHVDVKIKNATIXQYQLKGLEPETAYQVDIFAENNIGSSNPXFSHELVTLPESQAPADLGGGKMLLIAILGSAGMTCLTVLLAFLIILQLKRANVQRRMAQAFQNVREEPAVQFNSGTLALNRKVKNNPDPTIYPVLDWNDIKFQDVIGEGNFGQVLKARIKKDGLXMDAAIKRMKEYASKDDHRDFAGELEVLCKLGHHPNIINLLGACEHRGYLYLAIEYAPHGNLLDFLRKSRVLETDPAFAIANSTASTLSSQQLLHFAADVARGMDYLSQKQFIHRDLAARNILVGENYVAKIADFGLSRGQEVYVKKTMGRLPVRWMAIESLNYSVYTTNSDVWSYGVLLWEIVSLGGTPYCGMTCAELYEKLPQGYRLEKPLNCDDEVYDLMRQCWREKPYERPSFAQILVSLNRMLEERKTYVNTTLYEKFTYAGIDCSAEEAA

SEQ ID NO: 310 - protein, 1138 aa, Homo sapiens
  VARIANT 142: Xaa = A or T
  VARIANT 1109: Xaa = R or C
MVWRVPPFLLPILFLASHVGAAVDLTLLANLRLTDPQRFFLTCVSGEAGAGRGSDAWGPPLLLEKDDRIVRTPPGPPLRLARNGSHQVTLRGFSKPSDLVGVFSCVGGAGARRTRVIYVHNSPGAHLLPDKVTHTVNKGDTXVLSARVHKEKQTDVIWKSNGSYFYTLDWHEAQDGRFLLQLPNVQPPSSGIYSATYLEASPLGSAFFRLIVRGCGAGRWGPGCTKECPGCLHGGVCHDHDGECVCPPGFTGTRCEQACREGRFGQSCQEQCPGISGCRGLTFCLPDPYGCSCGSGWRGSQCQEACAPGHFGADCRLQCQCQNGGTCDRFSGCVCPSGWHGVHCEKSDRIPQILNMASELEFNLETMPRINCAAAGNPFPVRGSIELRKPDGTVLLSTKAIVEPEKTTAEFEVPRLVLADSGFWECRVSTSGGQDSRRFKVNVKVPPVPLAAPRLLTKQSRQLVVSPLVSFSGDGPISTVRLHYRPQDSTMDWSTIVVDPSENVTLMNLRPKTGYSVRVQLSRPGEGGEGAWGPPTLMTTDCPEPLLQPWLEGWHVEGTDRLRVSWSLPLVPGPLVGDGFLLRLWDGTRGQERRENVSSPQARTALLTGLTPGTHYQLDVQLYHCTLLGPASPPAHVLLPPSGPPAPRHLHAQALSDSEIQLTWKHPEALPGPISKYVVEVQVAGGAGDPLWIDVDRPEETSTIIRGLNASTRYLFRMRASIQGLGDWSNTVEESTLGNGLQAEGPVQESRAAEEGLDQQLILAVVGSVSATCLTILAALLTLVCIRRSCLHRRRTFTYQSGSGEETILQFSSGTLTLTRRPKLQPEPLSYPVLEWEDITFEDLIGEGNFGQVIRAMIKKDGLKMNAAIKMLKEYASENDHRDFAGELEVLCKLGHHPNIINLLGACKNRGYLYIAIEYAPYGNLLDFLRKSRVLETDPAFAREHGTASTLSSRQLLRFASDAANGMQYLSEKQFIHRDLAARNVLVGENLASKIADFGLSRGEEVYVKKTMGRLPVRWMAIESLNYSVYTTKSDVWSFGVLLWEIVSLGGTPYCGMTCAELYEKLPQGYRMEQPRNCDDEVYELMRQCWRDRPYERPPFAQIALQLGXMLEARKAYVNMSLFENFTYAGIDATAEEA

SEQ ID NO: 311 - protein, 455 aa, Homo sapiens
  VARIANT 75: Xaa = P or I
  VARIANT 121: Xaa = R or Q
  VARIANT 305: Xaa = P or T
MGLSTVPDLLLPLVLLELLVGIYPSGVIGLVPHLGDREKRDSVCPQGKYIHPQNNSICCTKCHKGTYLYNDCPGXGQDTDCRECESGSFTASENHLRHCLSCSKCRKEMGQVEISSCTVDXDTVCGCRKNQYRHYWSENLFQCFNCSLCLNGTVHLSCQEKQNTVCTCHAGFFLRENECVSCSNCKKSLECTKLCLPQIENVKGTEDSGTTVLLPLVIFFGLCLLSLLFIGLMYRYQRWKSKLYSIVCGKSTPEKEGELEGTTTKPLAPNPSFSPTPGFTPTLGFSPVPSSTFTSSSTYTPGDCXNFAAPRREVAPPYQGADPILATALASDPIPNPLQKWEDSAHKPQSLDTDDPATLYAVVENVPPLRWKEFVRRLGLSDHEIDRLELQNGRCLREAQYSMLATWRRRTPRREATLELLGRVLRDMDLLGCLEDIEEALCGPAALPPAPSLLR

SEQ ID NO: 312 - protein, 461 aa, Homo sapiens
  VARIANT 187: Xaa = V or M
  VARIANT 196: Xaa = M or R
  VARIANT 232: Xaa = E or K
  VARIANT 236: Xaa = A or T
  VARIANT 264: Xaa = L or P
  VARIANT 295: Xaa = Q or R
MAPVAVWAALAVGLELWAAAHALPAQVAFTPYAPEPGSTCRLREYYDQTAQMCCSKCSPGQHAKVFCTKTSDTVCDSCEDSTYTQLWNWVPECLSCGSRCSSDQVETQACTREQNRICTCRPGWYCALSKQEGCRLCAPLRKCRPGFGVARPGTETSDVVCKPCAPGTFSNTTSSTDICRPHQICNXVAIPGNASXDAVCTSTSPTRSMAPGAVHLPQPVSTRSQHTQPTPXPSTXPSTSFLLPMGPSPPAEGSTGDFALPVGXIVGVTALGLLIIGVVNCVIMTQVKKKPLCLXREAKVPHLPADKARGTQGPEQQHLLITAPSSSSSSLESSASALDRRAPTRNQPQAPGVEASGAGEARASTGSSDSSPGGHGTQVNVTCIVNVCSSSDHSSQCSSQASSTMGDTDSSPSESPKDEQVPFSKEECAFRSQLETPETLLGSTEEKPLPLGVPDAGMKPS

SEQ ID NO: 313 - protein, 1356 aa, Homo sapiens
  VARIANT 297, 952: Xaa = V or I
  VARIANT 349: Xaa = R or K
  VARIANT 392: Xaa = D or N
  VARIANT 472: Xaa = Q or H
  VARIANT 772: Xaa = A or T
  VARIANT 787: Xaa = R or G
  VARIANT 835: Xaa = K or N
  VARIANT 848: Xaa = V or E
  VARIANT 1147: Xaa = P or S
  VARIANT 1210: Xaa = P or A
  VARIANT 1347: Xaa = S or T
MQSKVLLAVALWLCVETRAASVGLPSVSLDLPRLSIQKDILTIKANTTLQITCRGQRDLDWLWPNNQSGSEQRVEVTECSDGLFCKTLTIPKVIGNDTGAYKCFYRETDLASVIYVYVQDYRSPFIASVSDQHGVVYITENKNKTVVIPCLGSISNLNVSLCARYPEKRFVPDGNRISWDSKKGFTIPSYMISYAGMVFCEAKINDESYQSIMYIVVVVGYRIYDVVLSPSHGIELSVGEKLVLNCTARTELNVGIDFNWEYPSSKHQHKKLVNRDLKTQSGSEMKKFLSTLTIDGXTRSDQGLYTCAASSGLMTKKNSTFVRVHEKPFVAFGSGMESLVEATVGERVXIPAKYLGYPPPEIKWYKNGIPLESNHTIKAGHVLTIMEVSERXTGNYTVILTNPISKEKQSHVVSLVVYVPPQIGEKSLISPVDSYQYGTTQTLTCTVYAIPPPHHIHWYWQLEEECANEPSXAVSVTNPYPCEEWRSVEDFQGGNKIEVNKNQFALIEGKNKTVSTLVIQAANVSALYKCEAVNKVGRGERVISFHVTRGPEITLQPDMQPTEQESVSLWCTADRSTFENLTWYKLGPQPLPIHVGELPTPVCKNLDTLWKLNATMFSNSTNDILIMELKNASLQDQGDYVCLAQDRKTKKRHCVVRQLTVLERVAPTITGNLENQTTSIGESIEVSCTASGNPPPQIMWFKDNETLVEDSGIVLKDGNRNLTIRRVRKEDEGLYTCQACSVLGCAKVEAFFIIEGAQEKTNLEIIILVGTXVIAMFFWLLLVIILXTVKRANGGELKTGYLSIVMDPDELPLDEHCERLPYDASKWEFPRDRLXLGKPLGRGAFGQXIEADAFGIDKTATCRTVAVKMLKEGATHSEHRALMSELKILIHIGHHLNVVNLLGACTKPGGPLMVIVEFCKFGNLSTYLRSKRNEFVPYKTKGARFRQGKDYXGAIPVDLKRRLDSITSSQSSASSGFVEEKSLSDVEEEEAPEDLYKDFLTLEHLICYSFQVAKGMEFLASRKCIHRDLAARNILLSEKNVVKICDFGLARDIYKDPDYVRKGDARLPLKWMAPETIFDRVYTIQSDVWSFGVLLWEIFSLGASPYPGVKIDEEFCRRLKEGTRMRAPDYTTPEMYQTMLDCWHGEXSQRPTFSELVEHLGNLLQANAQQDGKDYIVLPISETLSMEEDSGLSLPTSPVSCMEEEEVCDXKFHYDNTAGISQYLQNSKRKSRPVSVKTFEDIPLEEPEVKVIPDDNQTDSGMVLASEELKTLEDRTKLSPSFGGMVPSKSRESVASEGSNQTSGYQSGYHSDDTDTTVYSSEEAELLKLIEIGVQTGSTAQILQPDXGTTLSSPPV

SEQ ID NO: 314 - protein, 1298 aa, Homo sapiens
  VARIANT 24, 134: Xaa = D or G
  VARIANT 149: Xaa = N or D
  VARIANT 494: Xaa = T or A
  VARIANT 854: Xaa = G or S
  VARIANT 890: Xaa = Q or H
  VARIANT 915: Xaa = A or P
  VARIANT 916: Xaa = C or W
  VARIANT 933: Xaa = G or R
  VARIANT 954: Xaa = P or S
  VARIANT 1008: Xaa = P or L
  VARIANT 1041: Xaa = R or Q
  VARIANT 1137: Xaa = P or L
  VARIANT 1164: Xaa = D or E
  VARIANT 1189: Xaa = R or L
  VARIANT 1324: Xaa = R or L
MQRGAALCLRLWLCLGLLDGLVSXYSMTPPTLNITEESHVIDTGDSLSISCRGQHPLEWAWPGAQEAPATGDKDSEDTGVVRDCEGTDARPYCKVLLLHEVHANDTGSYVCYYKYIKARIEGTTAASSYVFVRXFEQPFINKPDTLLVXRKDAMWVPCLVSIPGLNVTLRSQSSVLWPDGQEVVWDDRRGMLVSTPLLHDALYLQCETTWGDQDFLSNPFLVHITGNELYDIQLLPRKSLELLVGEKLVLNCTVWAEFNSGVTFDWDYPGKQAERGKWVPERRSQQTHTELSSILTIHNVSQHDLGSYVCKANNGIQRFRESTEVIVHENPFISVEWLKGPILEATAGDELVKLPVKLAAYPPPEFQWYKDGKALSGRHSPHALVLKEVTEASTGTYTLALWNSAAGLRRNISLELVVNVPPQIHEKEASSPSIYSRHSRQALTCTAYGVPLPLSIQWHWRPWTPCKMFAQRSLRRRQQQDLMPQCRDWRAVTXQDAVNPIESLDTWTEFVEGKNKTVSKLVIQNANVSAMYKCVVSNKVGQDERLIYFYVTTIPDGFTIESKPSEELLEGQPVLLSCQADSYKYEHLRWYRLNLSTLHDAHGNPLLLDCKNVHLFATPLAASLEEVAPGARHATLSLSIPRVAPEHEGHYVCEVQDRRSHDKHCHKKYLSVQALEAPRLTQNLTDLLVNVSDSLEMQCLVAGAHAPSIVWYKDERLLEEKSGVDLADSNQKLSIQRVREEDAGPYLCSVCRPKGCVNSSASVAVEGSEDKGSMEIVILVGTGVIAVFFWVLLLLIFCNMRRPAHADIKTGYLSIIMDPGEVPLEEQCEYLSYDASQWEFPRERLHLGRVLGYXAFGKVVEASAFGIHKGSSCDTVAVKMLKEGATASEXRALMSELKILIHIGNHLNVVNLLGXXTKPQGPLMVIVEFCKYXNLSNFLRAKRDAFSPCAEKSXEQRGRFRAMVELARLDRRRPGSSDRVLFARFSKTEGGARRASPDQEAEDLWLSXLTMEDLVCYSFQVARGMEFLASRKCIHRDLAAXNILLSESDVVKICDFGLARDIYKDPDYVRKGSARLPLKWMAPESIFDKVYTTQSDVWSFGVLLWEIFSLGASPYPGVQINEEFCQRVRDGTRMRAXELATPAIRHIMLNCWSGDPKARPAFSXLVEILGDLLQGRGLQEEEEVCMAPXSSQSSEEGSFSQVSTMALHIAQADAEDSPPSLQRHSLAARYYNWVSFPGCLARGAETRGSSRMKTFEEFPMTPTTYKGSVDNQTDSGMVLASEEFEQIESRHRQESGFR

SEQ ID NO: 315 - DNA, 27 bp, synthetic
ccatgggcggcggcggctctgccatgg

SEQ ID NO: 316 - DNA, 42 bp, synthetic
ccatgggcggcggcggctctggcggcggcggctctgccatgg

SEQ ID NO: 317 - DNA, 75 bp, synthetic
ccatggcctcgtcgtcgtcgggctcgtcgtcgtcgggctcgtcgtcgtcgggctcgtcgtcgtcgggcgccatgg

SEQ ID NO: 318 - DNA, 45 bp, synthetic
ccatggcctcgtcgtcgtcgggctcgtcgtcgtcgggcgccatgg

SEQ ID NO: 319 - protein, 8 aa, synthetic
AAPAAAPA

SEQ ID NO: 320 - protein, 419 aa, Homo sapiens
MELAALCRWGLLLALLPPGAASTQVCTGTDMKLRLPASPETHLDMLRHLYQGCQVVQGNLELTYLPTNASLSFLQDIQEVQGYVLIAHNQVRQVPLQRLRIVRGTQLFEDNYALAVLDNGDPLNNTTPVTGASPGGLRELQLRSLTEILKGGVLIQRNPQLCYQDTILWKDIFHKNNQLALTLIDTNRSRACHPCSPMCKGSRCWGESSEDCQSLTRTVCAGGCARCKGPLPTDCCHEQCAAGCTGPKHSDCLACLHFNHSGICELHCPALVTYNTDTFESMPNPEGRYTFGASCVTACPYNYLSTDVGSCTLVCPLHNQEVTAEDGTQRCEKCSKPCARGTHSLPPRPAAVPVPLRMQPGPAHPVLSFLRPSWDLVSAFYSLPLAPLDPTSVPISPVSVGRGPSPDAHVAVDLSRYEG

SEQ ID NO: 321 - protein, 79 aa, Homo sapiens
GTHSLPPRPAAVPVPLRMQPGPAHPVLSFLRPSWDLVSAFYSLPLAPLSPTSVPISPVSVGRGPDPDAHVAVDLSRYEG

SEQ ID NO: 322 - protein, 419 aa, Homo sapiens
  VARIANT 342: Xaa= Thr or Ser
MELAALCRWGLLLALLPPGAASTQVCTGTDMKLRLPASPETHLDMLRHLYQGCQVVQGNLELTYLPTNASLSFLQDIQEVQGYVLIAHNQVRQVPLQRLRIVRGTQLFEDNYALAVLDNGDPLNNTTPVTGASPGGLRELQLRSLTEILKGGVLIQRNPQLCYQDTILWKDIFHKNNQLALTLIDTNRSRACHPCSPMCKGSRCWGESSEDCQSLTRTVCAGGCARCKGPLPTDCCHEQCAAGCTGPKHSDCLACLHFNHSGICELHCPALVTYNTDTFESMPNPEGRYTFGASCVTACPYNYLSTDVGSCTLVCPLHNQEVTAEDGTQRCEKCSKPCARGXHSLPPRPAAVPVPLRMQPGPAHPVLSFLRPSWDLVSAFYSLPLAPLSPTSVPISPVSVGRGPDPDAHVAVDLSRYEG

SEQ ID NO: 323 - protein, 419 aa, Homo sapiens
  VARIANT 345: Xaa= Leu or Pro
MELAALCRWGLLLALLPPGAASTQVCTGTDMKLRLPASPETHLDMLRHLYQGCQVVQGNLELTYLPTNASLSFLQDIQEVQGYVLIAHNQVRQVPLQRLRIVRGTQLFEDNYALAVLDNGDPLNNTTPVTGASPGGLRELQLRSLTEILKGGVLIQRNPQLCYQDTILWKDIFHKNNQLALTLIDTNRSRACHPCSPMCKGSRCWGESSEDCQSLTRTVCAGGCARCKGPLPTDCCHEQCAAGCTGPKHSDCLACLHFNHSGICELHCPALVTYNTDTFESMPNPEGRYTFGASCVTACPYNYLSTDVGSCTLVCPLHNQEVTAEDGTQRCEKCSKPCARGTHSXPPRPAAVPVPLRMQPGPAHPVLSFLRPSWDLVSAFYSLPLAPLSPTSVPISPVSVGRGPDPDAHVAVDLSRYEG

SEQ ID NO: 324 - protein, 419 aa, Homo sapiens
  VARIANT 346: Xaa= Pro or Leu
MELAALCRWGLLLALLPPGAASTQVCTGTDMKLRLPASPETHLDMLRHLYQGCQVVQGNLELTYLPTNASLSFLQDIQEVQGYVLIAHNQVRQVPLQRLRIVRGTQLFEDNYALAVLDNGDPLNNTTPVTGASPGGLRELQLRSLTEILKGGVLIQRNPQLCYQDTILWKDIFHKNNQLALTLIDTNRSRACHPCSPMCKGSRCWGESSEDCQSLTRTVCAGGCARCKGPLPTDCCHEQCAAGCTGPKHSDCLACLHFNHSGICELHCPALVTYNTDTFESMPNPEGRYTFGASCVTACPYNYLSTDVGSCTLVCPLHNQEVTAEDGTQRCEKCSKPCARGTHSLXPRPAAVPVPLRMQPGPAHPVLSFLRPSWDLVSAFYSLPLAPLSPTSVPISPVSVGRGPDPDAHVAVDLSRYEG

SEQ ID NO: 325 - protein, 419 aa, Homo sapiens
  VARIANT 356: Xaa= Leu or Gln
MELAALCRWGLLLALLPPGAASTQVCTGTDMKLRLPASPETHLDMLRHLYQGCQVVQGNLELTYLPTNASLSFLQDIQEVQGYVLIAHNQVRQVPLQRLRIVRGTQLFEDNYALAVLDNGDPLNNTTPVTGASPGGLRELQLRSLTEILKGGVLIQRNPQLCYQDTILWKDIFHKNNQLALTLIDTNRSRACHPCSPMCKGSRCWGESSEDCQSLTRTVCAGGCARCKGPLPTDCCHEQCAAGCTGPKHSDCLACLHFNHSGICELHCPALVTYNTDTFESMPNPEGRYTFGASCVTACPYNYLSTDVGSCTLVCPLHNQEVTAEDGTQRCEKCSKPCARGTHSLPPRPAAVPVPXRMQPGPAHPVLSFLRPSWDLVSAFYSLPLAPLSPTSVPISPVSVGRGPDPDAHVAVDLSRYEG

SEQ ID NO: 326 - protein, 419 aa, Homo sapiens
  VARIANT 358: Xaa= Met or Leu
MELAALCRWGLLLALLPPGAASTQVCTGTDMKLRLPASPETHLDMLRHLYQGCQVVQGNLELTYLPTNASLSFLQDIQEVQGYVLIAHNQVRQVPLQRLRIVRGTQLFEDNYALAVLDNGDPLNNTTPVTGASPGGLRELQLRSLTEILKGGVLIQRNPQLCYQDTILWKDIFHKNNQLALTLIDTNRSRACHPCSPMCKGSRCWGESSEDCQSLTRTVCAGGCARCKGPLPTDCCHEQCAAGCTGPKHSDCLACLHFNHSGICELHCPALVTYNTDTFESMPNPEGRYTFGASCVTACPYNYLSTDVGSCTLVCPLHNQEVTAEDGTQRCEKCSKPCARGTHSLPPRPAAVPVPLRXQPGPAHPVLSFLRPSWDLVSAFYSLPLAPLSPTSVPISPVSVGRGPDPDAHVAVDLSRYEG

SEQ ID NO: 327 - protein, 419 aa, Homo sapiens
  VARIANT 361: Xaa= Gly, Asp, Ala, or Val
MELAALCRWGLLLALLPPGAASTQVCTGTDMKLRLPASPETHLDMLRHLYQGCQVVQGNLELTYLPTNASLSFLQDIQEVQGYVLIAHNQVRQVPLQRLRIVRGTQLFEDNYALAVLDNGDPLNNTTPVTGASPGGLRELQLRSLTEILKGGVLIQRNPQLCYQDTILWKDIFHKNNQLALTLIDTNRSRACHPCSPMCKGSRCWGESSEDCQSLTRTVCAGGCARCKGPLPTDCCHEQCAAGCTGPKHSDCLACLHFNHSGICELHCPALVTYNTDTFESMPNPEGRYTFGASCVTACPYNYLSTDVGSCTLVCPLHNQEVTAEDGTQRCEKCSKPCARGTHSLPPRPAAVPVPLRMQPXPAHPVLSFLRPSWDLVSAFYSLPLAPLSPTSVPISPVSVGRGPDPDAHVAVDLSRYEG

SEQ ID NO: 328 - protein, 419 aa, Homo sapiens
  VARIANT 376: Xaa= Leu or Ile
MELAALCRWGLLLALLPPGAASTQVCTGTDMKLRLPASPETHLDMLRHLYQGCQVVQGNLELTYLPTNASLSFLQDIQEVQGYVLIAHNQVRQVPLQRLRIVRGTQLFEDNYALAVLDNGDPLNNTTPVTGASPGGLRELQLRSLTEILKGGVLIQRNPQLCYQDTILWKDIFHKNNQLALTLIDTNRSRACHPCSPMCKGSRCWGESSEDCQSLTRTVCAGGCARCKGPLPTDCCHEQCAAGCTGPKHSDCLACLHFNHSGICELHCPALVTYNTDTFESMPNPEGRYTFGASCVTACPYNYLSTDVGSCTLVCPLHNQEVTAEDGTQRCEKCSKPCARGTHSLPPRPAAVPVPLRMQPGPAHPVLSFLRPSWDXVSAFYSLPLAPLSPTSVPISPVSVGRGPDPDAHVAVDLSRYEG

SEQ ID NO: 329 - protein, 419 aa, Homo sapiens
  VARIANT 394: Xaa= Pro or Arg
MELAALCRWGLLLALLPPGAASTQVCTGTDMKLRLPASPETHLDMLRHLYQGCQVVQGNLELTYLPTNASLSFLQDIQEVQGYVLIAHNQVRQVPLQRLRIVRGTQLFEDNYALAVLDNGDPLNNTTPVTGASPGGLRELQLRSLTEILKGGVLIQRNPQLCYQDTILWKDIFHKNNQLALTLIDTNRSRACHPCSPMCKGSRCWGESSEDCQSLTRTVCAGGCARCKGPLPTDCCHEQCAAGCTGPKHSDCLACLHFNHSGICELHCPALVTYNTDTFESMPNPEGRYTFGASCVTACPYNYLSTDVGSCTLVCPLHNQEVTAEDGTQRCEKCSKPCARGTHSLPPRPAAVPVPLRMQPGPAHPVLSFLRPSWDLVSAFYSLPLAPLSPTSVXISPVSVGRGPDPDAHVAVDLSRYEG

SEQ ID NO: 330 - protein, 419 aa, Homo sapiens
  VARIANT 404: Xaa= Pro or Leu
MELAALCRWGLLLALLPPGAASTQVCTGTDMKLRLPASPETHLDMLRHLYQGCQVVQGNLELTYLPTNASLSFLQDIQEVQGYVLIAHNQVRQVPLQRLRIVRGTQLFEDNYALAVLDNGDPLNNTTPVTGASPGGLRELQLRSLTEILKGGVLIQRNPQLCYQDTILWKDIFHKNNQLALTLIDTNRSRACHPCSPMCKGSRCWGESSEDCQSLTRTVCAGGCARCKGPLPTDCCHEQCAAGCTGPKHSDCLACLHFNHSGICELHCPALVTYNTDTFESMPNPEGRYTFGASCVTACPYNYLSTDVGSCTLVCPLHNQEVTAEDGTQRCEKCSKPCARGTHSLPPRPAAVPVPLRMQPGPAHPVLSFLRPSWDLVSAFYSLPLAPLSPTSVPISPVSVGRGXDPDAHVAVDLSRYEG

SEQ ID NO: 331 - protein, 419 aa, Homo sapiens
  VARIANT 413: Xaa= Asp or Asn
MELAALCRWGLLLALLPPGAASTQVCTGTDMKLRLPASPETHLDMLRHLYQGCQVVQGNLELTYLPTNASLSFLQDIQEVQGYVLIAHNQVRQVPLQRLRIVRGTQLFEDNYALAVLDNGDPLNNTTPVTGASPGGLRELQLRSLTEILKGGVLIQRNPQLCYQDTILWKDIFHKNNQLALTLIDTNRSRACHPCSPMCKGSRCWGESSEDCQSLTRTVCAGGCARCKGPLPTDCCHEQCAAGCTGPKHSDCLACLHFNHSGICELHCPALVTYNTDTFESMPNPEGRYTFGASCVTACPYNYLSTDVGSCTLVCPLHNQEVTAEDGTQRCEKCSKPCARGTHSLPPRPAAVPVPLRMQPGPAHPVLSFLRPSWDLVSAFYSLPLAPLSPTSVPISPVSVGRGPDPDAHVAVXLSRYEG

SEQ ID NO: 332 - protein, 419 aa, Homo sapiens
  VARIANT 357: Xaa= Arg or Cys
MELAALCRWGLLLALLPPGAASTQVCTGTDMKLRLPASPETHLDMLRHLYQGCQVVQGNLELTYLPTNASLSFLQDIQEVQGYVLIAHNQVRQVPLQRLRIVRGTQLFEDNYALAVLDNGDPLNNTTPVTGASPGGLRELQLRSLTEILKGGVLIQRNPQLCYQDTILWKDIFHKNNQLALTLIDTNRSRACHPCSPMCKGSRCWGESSEDCQSLTRTVCAGGCARCKGPLPTDCCHEQCAAGCTGPKHSDCLACLHFNHSGICELHCPALVTYNTDTFESMPNPEGRYTFGASCVTACPYNYLSTDVGSCTLVCPLHNQEVTAEDGTQRCEKCSKPCARGTHSLPPRPAAVPVPLXMQPGPAHPVLSFLRPSWDLVSAFYSLPLAPLSPTSVPISPVSVGRGPDPDAHVAVDLSRYEG

SEQ ID NO: 333 - protein, 419 aa, Homo sapiens
  VARIANT 371: Xaa= Arg or Ile
MELAALCRWGLLLALLPPGAASTQVCTGTDMKLRLPASPETHLDMLRHLYQGCQVVQGNLELTYLPTNASLSFLQDIQEVQGYVLIAHNQVRQVPLQRLRIVRGTQLFEDNYALAVLDNGDPLNNTTPVTGASPGGLRELQLRSLTEILKGGVLIQRNPQLCYQDTILWKDIFHKNNQLALTLIDTNRSRACHPCSPMCKGSRCWGESSEDCQSLTRTVCAGGCARCKGPLPTDCCHEQCAAGCTGPKHSDCLACLHFNHSGICELHCPALVTYNTDTFESMPNPEGRYTFGASCVTACPYNYLSTDVGSCTLVCPLHNQEVTAEDGTQRCEKCSKPCARGTHSLPPRPAAVPVPLRMQPGPAHPVLSFLXPSWDLVSAFYSLPLAPLSPTSVPISPVSVGRGPDPDAHVAVDLSRYEG

SEQ ID NO: 334 - protein, 79 aa, Homo sapiens
  VARIANT 2: Xaa= Thr or Ser
GXHSLPPRPAAVPVPLRMQPGPAHPVLSFLRPSWDLVSAFYSLPLAPLSPTSVPISPVSVGRGPDPDAHVAVDLSRYEG

SEQ ID NO: 335 - protein, 79 aa, Homo sapiens
  VARIANT 5: Xaa= Leu or Pro
GTHSXPPRPAAVPVPLRMQPGPAHPVLSFLRPSWDLVSAFYSLPLAPLSPTSVPISPVSVGRGPDPDAHVAVDLSRYEG

SEQ ID NO: 336 - protein, 79 aa, Homo sapiens
  VARIANT 6: Xaa= Pro or Leu
GTHSLXPRPAAVPVPLRMQPGPAHPVLSFLRPSWDLVSAFYSLPLAPLSPTSVPISPVSVGRGPDPDAHVAVDLSRYEG

SEQ ID NO: 337 - protein, 79 aa, Homo sapiens
  VARIANT 16: Xaa= Leu or Gln
GTHSLPPRPAAVPVPXRMQPGPAHPVLSFLRPSWDLVSAFYSLPLAPLSPTSVPISPVSVGRGPDPDAHVAVDLSRYEG

SEQ ID NO: 338 - protein, 79 aa, Homo sapiens
  VARIANT 18: Xaa= Met or Leu
GTHSLPPRPAAVPVPLRXQPGPAHPVLSFLRPSWDLVSAFYSLPLAPLSPTSVPISPVSVGRGPDPDAHVAVDLSRYEG

SEQ ID NO: 339 - protein, 79 aa, Homo sapiens
  VARIANT 21: Xaa= Gly, Asp, Ala, or Val
GTHSLPPRPAAVPVPLRMQPXPAHPVLSFLRPSWDLVSAFYSLPLAPLSPTSVPISPVSVGRGPDPDAHVAVDLSRYEG

SEQ ID NO: 340 - protein, 79 aa, Homo sapiens
  VARIANT 36: Xaa= Leu or Ile
GTHSLPPRPAAVPVPLRMQPGPAHPVLSFLRPSWDXVSAFYSLPLAPLSPTSVPISPVSVGRGPDPDAHVAVDLSRYEG

SEQ ID NO: 341 - protein, 79 aa, Homo sapiens
  VARIANT 54: Xaa= Pro or Arg
GTHSLPPRPAAVPVPLRMQPGPAHPVLSFLRPSWDLVSAFYSLPLAPLSPTSVXISPVSVGRGPDPDAHVAVDLSRYEG

SEQ ID NO: 342 - protein, 79 aa, Homo sapiens
  VARIANT 64: Xaa= Pro or Leu
GTHSLPPRPAAVPVPLRMQPGPAHPVLSFLRPSWDLVSAFYSLPLAPLSPTSVPISPVSVGRGXDPDAHVAVDLSRYEG

SEQ ID NO: 343 - protein, 79 aa, Homo sapiens
  VARIANT 73: Xaa= Asp or Asn
GTHSLPPRPAAVPVPLRMQPGPAHPVLSFLRPSWDLVSAFYSLPLAPLSPTSVPISPVSVGRGPDPDAHVAVXLSRYEG

SEQ ID NO: 344 - protein, 79 aa, Homo sapiens
  VARIANT 17: Xaa= Arg or Cys
GTHSLPPRPAAVPVPLXMQPGPAHPVLSFLRPSWDLVSAFYSLPLAPLSPTSVPISPVSVGRGPDPDAHVAVDLSRYEG

SEQ ID NO: 345 - protein, 79 aa, Homo sapiens
  VARIANT 31: Xaa= Arg or Ile
GTHSLPPRPAAVPVPLRMQPGPAHPVLSFLXPSWDLVSAFYSLPLAPLSPTSVPISPVSVGRGPDPDAHVAVDLSRYEG

SEQ ID NO: 346 - DNA, 240 bp, Homo sapiens
ggtacccactcactgcccccgaggccagctgcagttcctgtccctctgcgcatgcagcctggcccagcccaccctgtcctatccttcctcagaccctcttgggacctagtctctgccttctactctctacccctggcccccctcagccctacaagtgtccctatatcccctgtcagtgtggggaggggcccggaccctgatgctcatgtggctgttgacctgtcccggtatgaaggctga

SEQ ID NO: 347 - DNA, 240 bp, Homo sapiens
  misc_feature 4: n= T
ggtncccactcactgcccccgaggccagctgcagttcctgtccctctgcgcatgcagcctggcccagcccaccctgtcctatccttcctcagaccctcttgggacctagtctctgccttctactctctacccctggcccccctcagccctacaagtgtccctatatcccctgtcagtgtggggaggggcccggaccctgatgctcatgtggctgttgacctgtcccggtatgaaggctga

SEQ ID NO: 348 - DNA, 240 bp, Homo sapiens
  misc_feature 14: n= C
ggtacccactcacngcccccgaggccagctgcagttcctgtccctctgcgcatgcagcctggcccagcccaccctgtcctatccttcctcagaccctcttgggacctagtctctgccttctactctctacccctggcccccctcagccctacaagtgtccctatatcccctgtcagtgtggggaggggcccggaccctgatgctcatgtggctgttgacctgtcccggtatgaaggctga

SEQ ID NO: 349 - DNA, 240 bp, Homo sapiens
  misc_feature 17: n= T
ggtacccactcactgcncccgaggccagctgcagttcctgtccctctgcgcatgcagcctggcccagcccaccctgtcctatccttcctcagaccctcttgggacctagtctctgccttctactctctacccctggcccccctcagccctacaagtgtccctatatcccctgtcagtgtggggaggggcccggaccctgatgctcatgtggctgttgacctgtcccggtatgaaggctga

SEQ ID NO: 350 - DNA, 240 bp, Homo sapiens
  misc_feature 47: n= A
ggtacccactcactgcccccgaggccagctgcagttcctgtccctcngcgcatgcagcctggcccagcccaccctgtcctatccttcctcagaccctcttgggacctagtctctgccttctactctctacccctggcccccctcagccctacaagtgtccctatatcccctgtcagtgtggggaggggcccggaccctgatgctcatgtggctgttgacctgtcccggtatgaaggctga

SEQ ID NO: 351 - DNA, 240 bp, Homo sapiens
  misc_feature 54: n= A
ggtacccactcactgcccccgaggccagctgcagttcctgtccctctgcgcatncagcctggcccagcccaccctgtcctatccttcctcagaccctcttgggacctagtctctgccttctactctctacccctggcccccctcagccctacaagtgtccctatatcccctgtcagtgtggggaggggcccggaccctgatgctcatgtggctgttgacctgtcccggtatgaaggctga

SEQ ID NO: 352 - DNA, 240 bp, Homo sapiens
  misc_feature 62: n= C, T, or A
ggtacccactcactgcccccgaggccagctgcagttcctgtccctctgcgcatgcagcctgncccagcccaccctgtcctatccttcctcagaccctcttgggacctagtctctgccttctactctctacccctggcccccctcagccctacaagtgtccctatatcccctgtcagtgtggggaggggcccggaccctgatgctcatgtggctgttgacctgtcccggtatgaaggctga

SEQ ID NO: 353 - DNA, 240 bp, Homo sapiens
  misc_feature 106: n= A
ggtacccactcactgcccccgaggccagctgcagttcctgtccctctgcgcatgcagcctggcccagcccaccctgtcctatccttcctcagaccctcttgggacntagtctctgccttctactctctacccctggcccccctcagccctacaagtgtccctatatcccctgtcagtgtggggaggggcccggaccctgatgctcatgtggctgttgacctgtcccggtatgaaggctga

SEQ ID NO: 354 - DNA, 240 bp, Homo sapiens
  misc_feature 161: n= C
ggtacccactcactgcccccgaggccagctgcagttcctgtccctctgcgcatgcagcctggcccagcccaccctgtcctatccttcctcagaccctcttgggacctagtctctgccttctactctctacccctggcccccctcagccctacaagtgtccntatatcccctgtcagtgtggggaggggcccggaccctgatgctcatgtggctgttgacctgtcccggtatgaaggctga

SEQ ID NO: 355 - DNA, 240 bp, Homo sapiens
  misc_feature 191: n= T
ggtacccactcactgcccccgaggccagctgcagttcctgtccctctgcgcatgcagcctggcccagcccaccctgtcctatccttcctcagaccctcttgggacctagtctctgccttctactctctacccctggcccccctcagccctacaagtgtccctatatcccctgtcagtgtggggaggggccnggaccctgatgctcatgtggctgttgacctgtcccggtatgaaggctga

SEQ ID NO: 356 - DNA, 240 bp, Homo sapiens
  misc_feature 217: n= C
ggtacccactcactgcccccgaggccagctgcagttcctgtccctctgcgcatgcagcctggcccagcccaccctgtcctatccttcctcagaccctcttgggacctagtctctgccttctactctctacccctggcccccctcagccctacaagtgtccctatatcccctgtcagtgtggggaggggcccggaccctgatgctcatgtggctgttnacctgtcccggtatgaaggctga

SEQ ID NO: 357 - DNA, 240 bp, Homo sapiens
  misc_feature 17: n= T
  misc_feature 217: n= C
ggtacccactcactgcncccgaggccagctgcagttcctgtccctctgcgcatgcagcctggcccagcccaccctgtcctatccttcctcagaccctcttgggacctagtctctgccttctactctctacccctggcccccctcagccctacaagtgtccctatatcccctgtcagtgtggggaggggcccggaccctgatgctcatgtggctgttnacctgtcccggtatgaaggctga

SEQ ID NO: 358 - DNA, 240 bp, Homo sapiens
  misc_feature 49: n= T
ggtacccactcactgcccccgaggccagctgcagttcctgtccctctgngcatgcagcctggcccagcccaccctgtcctatccttcctcagaccctcttgggacctagtctctgccttctactctctacccctggcccccctcagccctacaagtgtccctatatcccctgtcagtgtggggaggggcccggaccctgatgctcatgtggctgttnacctgtcccggtatgaaggctga

SEQ ID NO: 359 - DNA, 240 bp, Homo sapiens
  misc_feature 92: n= T
ggtacccactcactgcccccgaggccagctgcagttcctgtccctctgcgcatgcagcctggcccagcccaccctgtcctatccttcctcanaccctcttgggacctagtctctgccttctactctctacccctggcccccctcagccctacaagtgtccctatatcccctgtcagtgtggggaggggcccggaccctgatgctcatgtggctgttnacctgtcccggtatgaaggctga
